(19) United States
(12) Patent Application Publication
(10) Pub. No.: US 2022/0162626 A1
(43) Pub. Date: May 26, 2022

(54) Modulation of Transgene Expression

(71) Applicant: Syngenta Crop Protection AG, Basel (CH)

(72) Inventors: Julie Leonard Green, Research Triangle Park, NC (US); Timothy Joseph KELLIHER, Research Triangle Park, NC (US)

(73) Assignee: Syngenta Crop Protection AG, Basel (CH)

(21) Appl. No.: 17/441,509

(22) PCT Filed: Mar. 26, 2020
(86) PCT No.: PCT/US2020/024823

§ 371 Date: Sep. 21, 2021

Related U.S. Application Data
(60) Provisional application No. 62/825,107, filed on Mar. 28, 2019.

(51) Int. Cl. C12N 15/82

(52) U.S. Cl. CPC C12N 15/8218; C12N 15/8286

(57) ABSTRACT

Compositions and methods of modulating, for example reducing, recombinant insecticidal protein expression in male reproductive cells and/or tissues of transgenic plants are disclosed. In particular, novel recombinant DNA constructs useful in such methods, as well as transgenic plants, cells, and seeds containing such recombinant DNA constructs are provided. The recombinant DNA constructs and the transgenic plants, cells, and seeds containing such constructs provide a greatly improved way to minimize any potential risks that may be associated with expression of insecticidal proteins in male reproductive tissues.

### SEQUENCE LISTING

[0001] A Sequence Listing in ASCII text format, submitted under 37 C.F.R. § 1.821, entitled “81814-US-L-ORG-P-1_ST25.txt”, 701 kilobytes in size, generated on Mar. 28, 2019 and filed via EFS-Web is provided in lieu of a paper copy. This Sequence Listing is hereby incorporated by reference into the specification for its disclosures.

### FIELD OF THE INVENTION

[0002] The present invention discloses molecular constructs and methods for the control of transgene expression, for example, transgene suppression in plants or suppressing expression of a target RNA in a specific cell or tissue. Also disclosed are transgenic eukaryotes, including transgenic plant cells, plants, and seeds, whose genome includes molecular constructs for controlling expression of an exogenous gene.

### BACKGROUND

[0003] Transgenic crops consist of increasingly complex genetic modifications including multiple transgenes that confer different traits, also called “gene stacks” or “trait stacks.” For example, many transgenic corn products currently on the market contain within the same plant multiple genes encoding insecticidal proteins for controlling a broad spectrum of insect pests, multiple genes encoding proteins that confer on the plant tolerance to a wide spectrum of chemical herbicides and multiple genes encoding proteins that are used as selectable markers during the plant transformation process. Many of the transgenic proteins used to control insect pests, for example the crystal endotoxins from Bacillus thuringiensis (called Cry proteins) are active against lepidopteran or coleopteran insect pests. Examples of lepidopteran-active Cry proteins include Cry1A, Cry1B, Cry1C, Cry1D, Cry1E, Cry1F and Cry9. Examples of coleopteran-active Cry proteins include, Cry3A, Cry3B, Cry3C, Cry8, the binary Cry23-Cry37 and the binary Cry34-Cry35. Most individual Cry proteins are biologically active against a narrow spectrum of insect species within a given insect order. Even with this narrow spectrum of activity, certain Cry proteins may have low to moderate activity against certain non-pest species in the same order of insects as the target pest insects. For example, Hellmich et al. (2001) Proc. Natl. Aca. Sci. 98:11925-11930, found that certain purified Cry proteins that are active against a lepidopteran pest, e.g. European corn borer (Ostrinia nubilalis), also have some activity against the first instar of the non-pest lepidopteran insect, monarch butterfly (Danaus plexippus). However, later larval instars D. plexippus were far less susceptible.

[0004] Currently, expression of most transgenes encoding insecticidal proteins in commercial transgenic crops is driven by constitutive promoters, i.e. promoters that are functional throughout the plant in all or a majority of tissue types, including pollen, throughout the entire growth cycle of the plant. Since plant pollen may be a food source for some non-pest insect species or it is hypothesized that plant pollen may be carried by wind to deposit on non-pest insect host plants, there is some concern within regulatory agencies that regulate transgenic crop commercialization that high levels of expression of certain insecticidal proteins, e.g. certain Cry proteins, in pollen may have adverse effects on localized populations of non-pest insects. In addition, it has been observed that expression of certain insecticidal proteins in pollen has adverse effects on the transgenic plant's male fertility. For example, high levels of a Vip3 insecticidal protein expressed in corn pollen may cause a decrease in male fertility or complete sterility in certain inbred genetic backgrounds (U.S. Pat. No. 10,214,784; herein incorporated by reference). Therefore, it would be beneficial to modulate the expression of insecticidal proteins in transgenic plants, for example, to have high levels of expression in vegetative tissues, e.g. leaf tissue, where a majority of pest insects initially feed, but have reduced expression in pollen, a plant tissue that some non-pest insects may feed upon.

[0005] Most research directed at targeting plant transgene expression in a temporal and/or spatial manner has focused on the use of promoters, from viral and plant constitutive promoters, to tissue- and cell-specific promoters, to inducible and synthetic promoters. Promoter selection has become increasingly important for successful gene transfer and expression of transgenes in plants. However, quite frequently, the spatial and temporal functionality of a promoter in its natural setting, e.g. a wild-type non-transgenic plant, does not predict the spatial and temporal functionality when used in a nucleic acid construct to drive expression of a heterologous transgene. For example, a promoter that has root-specific functionality in wild-type (non-transgenic) corn plants, may function as a constitutive promoter or a root-preferred only promoter, i.e. expresses more highly in roots but also has leaky expression in other tissues such as vegetative tissues, when it is used to drive a heterologous transgene in transgenic corn. Therefore, alternatives to using promoters or in addition to promoters to control transgene expression in plants is needed to modulate, e.g. suppress or increase, expression in certain tissues of transgenic crops, particularly in male reproductive tissues like pollen and/or tapetum. Ideally, the alternative methods and compositions would modulate, for example suppress, the expression of a transgene that encodes an insecticidal protein in male reproductive cells or tissues, regardless of what promoter is used to drive expression of the transgene in the transgenic plant.

[0006] Mechanisms that suppress the expression of specific cellular genes, viruses or mobile genetic elements (such as transposons and retro-elements) are critical for normal cellular function in a variety of eukaryotes. A number of related processes, discovered independently in plants (Matzke et al., Curr. Opin. Genet. Dev. 11:221-227, 2001), animals (Fire et al., Nature, 391:806-811, 1998) and fungi (Cogoni, Annu. Rev. Microbiol. 55:381-406, 2001), result in the RNA-directed inhibition of gene expression (also known as RNA silencing). Each of these processes is triggered by molecules containing double-stranded RNA (dsRNA) structure, such as transcripts containing inverted repeats or double-stranded RNA intermediates formed during RNA virus replication. Non-dsRNAs, also referred to as aberrant RNAs, may also function as initiators of RNA silencing. Such aberrant RNAs may be converted into dsRNAs by silencing-associated RNA-dependent RNA polymerases (RDRs), which have been identified in plants, fungi and the nematode C. elegans (Tuschl, Chem Biochem, 2:239-245, 2001).

[0007] Two major classes of small RNAs have been characterized: short interfering RNAs (siRNAs) and microRNAs (miRNAs). The primary transcripts that eventually form miRNAs are transcribed from non-protein-coding miRNA genes. These transcripts form hairpin structures that are then processed by Dicer (or by Dicer-like activities in plants) to yield small RNA duplexes containing 2-base overhangs at each 3′ end. The mature single-stranded miRNA approximately 20-22 nucleotides in length forms by dissociation of the two strands in the duplex, and is selectively incorporated into the RNA-Induced Silencing Complex, or RISC (Zamore, Science, 296:1265-1269, 2002; Tang et al., Genes Dev., 17:49-63, 2003; Xie et al., Curr. Biol. 13:784-789, 2003).

[0008] siRNAs are similar in chemical structure to miRNAs, however siRNAs are generated by the cleavage of relatively long double-stranded RNA molecules by Dicer or DCL enzymes (Zamore, Science, 296:1265-1269, 2002; Bernstein et al., Nature, 409:363-366, 2001). In animals and plants, siRNAs are assembled into RISC and guide the sequence specific ribonucleolytic activity of RISC, thereby resulting in the cleavage of mRNAs, viral RNAs or other RNA target molecules in the cytoplasm. In the nucleus, siRNAs also guide heterochromatin-associated histone and DNA methylation, resulting in transcriptional silencing of individual genes or large chromatin domains.

[0009] MicroRNAs in plants and animals function as posttranscriptional regulators of genes involved in a wide range of cellular processes (Bartel, Cell 116:281-297, 2004; He & Hannon, Nat Rev Genet. 5:522-531, 2004). In the plant Arabidopsis thaliana, miRNAs regulate mRNAs encoding at least twelve families of transcription factors, several miRNA metabolic factors, and proteins involved in stress responses, metabolism, and hormone signaling (Jones-Rhoades & Bartel, Mol Cell 14:787-799, 2004; Kasschau et al., Dev Cell 4:205-217, 2003; Llave et al., Science 297:2053-2056, 2002b; Vazquez et al., Curr Biol 14:346-351, 2004a; Xie et al., Curr Biol 13:784-789, 2003). Plant miRNAs target a disproportionately high number of genes with functions in developmental processes, including developmental timing, control of cell proliferation, meristem cell function, and patterning. Global disruption of miRNA biogenesis or function, or specific disruption of miRNA-target interactions, can result in severe developmental abnormalities (Achard et al., Development 131:3357-3365, 2004; Chen, Science 303:2022-2025, 2004; Emery et al., Curr Biol 13:1768-1774, 2003; Juarez et al., Nature 428:84-88, 2004; Kidner & Martienssen, Nature 428:81-84, 2004; Laufs et al., Development 131:4311-4322, 2004; Mallory et al., Curr Biol 14:1035-1046, 2004; Palatnik et al., Nature 425:257-263, 2003; Tang et al., Genes & Dev 17:49-63 2003; Vaucheret et al., Genes Dev 18:1187-1197, 2004), indicating that miRNA-based regulation is crucial for normal growth and development. This idea is reinforced by the conservation of most miRNAs and their corresponding targets through significant evolutionary time (Bartel, Cell 116:281-297, 2004). MicroRNAs have been identified by direct cloning methods and computational prediction strategies (Jones-Rhoades & Bartel, Mol Cell 14:787-799, 2004; Llave et al., Plant Cell 14:1605-1619, 2000a; Park et al., Curr Biol 12:1484-1495, 2002; Reinhart et al., Genes Dev 16:1616-1626, 2002; Sunkar & Zhu, Plant Cell 16:2001-2019, 2004).

[0010] Plant miRNAs usually contain near-perfect complementarity with target sites, which are found most commonly in protein-coding regions of the genome. As a result, most (but not all) plant miRNAs function to guide cleavage of targets through a mechanism similar to the siRNA-guided mechanism associated with RNAi (Jones-Rhoades & Bartel, Mol Cell 14:787-799, 2004; Kasschau et al., Dev Cell 4:205-217, 2003; Llave et al., Science 297:2053-2056, 2002; Tang et al., Genes & Dev 17:49-63 2003). In contrast, animal miRNAs contain relatively low levels of complementarity to their target sites, which are most commonly found in multiple copies within 3′ untranslated regions of the target transcript (Lewis et al., Cell 115:787-798, 2003; Rajewsky & Socci, Dev Biol 267:529-535, 2004; Stark et al., PLoS Biol 1:E60, 2003). Most animal miRNAs do not guide cleavage, but rather function to repress expression at the translational or co-translational level (Ambros, Cell 113:673-676, 2003; He & Hannon, Nat Rev Genet. 5:522-531, 2004). At least some plant miRNAs may also function as translational repressors (Aukerman & Sakai, Plant Cell 15:2730-2741, 2003; Chen, Science 303:2022-2025, 2004). Translation repression is not an inherent activity of animal miRNAs, as miRNAs will guide cleavage if presented with a target containing high levels of complementarity (Doench et al., Genes Dev 17:438-442, 2003; Hutvagner & Zamore, Science 297:2056-2060, 2002; Yekta et al., Science 304:594-596, 2004; Zeng et al., Proc Natl Acad Sci USA 100:9779-9784, 2003).

[0011] MicroRNAs form through nucleolytic maturation of genetically defined RNA precursors that adopt imperfect, self-complementary fold-back structures. Processing yields a duplex intermediate (miRNA/miRNA*) that ultimately provides the miRNA strand to the effector complex, termed RISC (Khvorova et al., Cell 115:209-216, 2003; Schwarz et al., Cell 115:199-208, 2003). Plants contain four DICER-LIKE (DCL) proteins, one of which (DCL1) is necessary for maturation of most or all miRNA precursors (Kurihara & Watanabe, Proc Natl Acad Sci USA 101:12753-12758, 2004; Park et al., Curr Biol 12:1484-1495, 2002; Reinhart et al., Genes Dev 16:1616-1626, 2002; Schauer et al., Trends Plant Sci 7:487-491, 2002). The DCL1 protein contains an RNA helicase and two RNaseIII-like domains, a central PAZ domain and C-terminal dsRNA binding motifs. Animal miRNA precursor processing requires Drosha, another RNaseIII domain protein, and Dicer in sequential nucleolytic steps (Lee et al., Nature 425:415-419, 2003). HEN1 participates in miRNA biogenesis or stability in plants via a 3′ methylase activity (Boutet et al., Curr Biol 13:843-848, 2003; Park et al., Curr Biol 12:1484-1495, 2002). The dsRNA-binding HYL1 protein is necessary for miRNA biogenesis in cooperation with DCL1 and HEN1 in the nucleus. Based on sequence similarity, HYL1 has been suggested to function like animal R2D2, which is required post-processing during RISC assembly (Han et al., Proc Natl Acad Sci USA 101:1093-1098, 2004; Liu et al., Science 301:1921-1925, 2003; Pham et al., Cell 117:83-94, 2004; Tomari et al., Science 306:1377-1380, 2004; Vazquez et al., Curr Biol 14:346-351, 2004a). In animals, Exportin-5 (Exp5) regulates the transport of pre-miRNAs from the nucleus to the cytoplasm by a Ran-GTP-dependent mechanism (Bohnsack et al., RNA 10:185-191, 2004; Lund et al., Science 303:95-98, 2003; Yi et al., Genes Dev 17:3011-3016, 2003). In Arabidopsis, HST may provide a related function to transport miRNA intermediates to the cytoplasm (Bollman et al., Development 130:1493-1504, 2003). Active miRNA-containing RISC complexes in plants almost certainly contain one or more ARGONAUTE proteins, such as AGO1 (Fagard et al., Proc Natl Acad Sci USA 97:11650-11654, 2000; Vaucheret et al., Genes Dev 18:1187-1197, 2004). Argonaute proteins in animals were shown recently to provide the catalytic activity for target cleavage (Liu et al., Science 305:1437-1441, 2004; Meister et al., Mol Cell 15:185-197, 2004).

[0012] In addition to miRNAs, plants also produce diverse sets of endogenous 21-25 nucleotide small RNAs. Most of these differ from miRNAs in that they arise from double-stranded RNA (rather than imperfect fold-back structures), in some cases generated by the activity of RNA-DEPENDENT RNA POLYMERASEs (RDRs). Arabidopsis DCL2, DCL3, DCL4, RDR1, RDR2 and RDR6 have known roles in siRNA biogenesis (Dalmay et al., Cell 101:543-553, 2000; Mourrain et al., Cell 101:533-542, 2000; Peragine et al., Genes & Dev 18:2369-2379, 2004; Vazquez et al., Mol Cell 16:69-79, 2004b; Xie et al., PLoS Biol 2:642-652, 2004; Yu et al., Mol Plant Microbe Interact 16:206-216, 2003). For example, DCL3 and RDR2 cooperate in the heterochromatin-associated RNAi pathway, resulting in .about.24-nucleotide siRNAs from various retro-elements and transposons, 5S rDNA loci, endogenous direct and inverted repeats, and transgenes containing direct repeats (Xie et al., PLoS Biol 2:642-652, 2004; Zilberman et al., Science 299:716-719, 2003). RDR6 functions in posttranscriptional RNAi of sense transgenes, some viruses, and specific endogenous mRNAs that are targeted by trans-acting siRNAs (ta-siRNAs) (Dalmay et al., Cell 101:543-553, 2000; Mourrain et al., Cell 101:533-542, 2000; Peragine et al., Genes & Dev 18:2369-2379, 2004; Vazquez et al., Mol Cell 16:69-79, 2004b; Yu et al., Mol Plant Microbe Interact 16:206-216, 2003). Ta-siRNAs arise from transcripts that are recognized by RDR6, in cooperation with SGS3, as a substrate to form dsRNA. The dsRNA is processed accurately in 21-nucleotide steps by DCL1 to yield a set of “phased” ta-siRNAs. These ta-siRNAs interact with target mRNAs to guide cleavage by the same mechanism as do plant miRNAs (Peragine et al., Genes & Dev 18:2369-2379, 2004; Vazquez et al., Mol Cell 16:69-79, 2004).

[0013] In view of the above-described problems with modulating transgene expression in transgenic plants, the present invention provides novel DNA constructs comprising novel miRNA elements as well as methods of using the miRNA elements and constructs to modulate expression of transgenes encoding insecticidal proteins in male reproductive tissues of transgenic plants. Such compositions and methods take advantage of endogenous microRNAs that are functional in tissues in which modulation of transgene expression is desired.

### SUMMARY

[0014] The invention relates generally to methods of modulating, for example reducing, recombinant insecticidal protein expression in male reproductive cells and/or tissues of transgenic plants, recombinant DNA constructs useful in such methods, as well as transgenic plants, cells, and seeds containing such recombinant DNA constructs. The recombinant DNA constructs and the transgenic plants, cells, and seeds containing such constructs provide a greatly improved way to minimize any potential risks to non-pest insect species associated with expression of insecticidal proteins in pollen or for mitigating the impact that expression of insecticidal proteins in pollen and/or tapetum may have on male fertility in transgenic plants.

[0015] In one aspect, the invention provides a recombinant DNA construct that includes a protein-coding sequence encoding a recombinant protein, for example an insecticidal protein, and a DNA that transcribes to a microRNA (miRNA) element capable of initiating binding with an endogenous plant miRNA that is male tissue-specific or male tissue-preferred comprising, for example, a miRNA initiator sequence, operably linked to the protein-coding sequence. In one embodiment, the miRNA element is included within the 3′ untranslated region of the protein-coding sequence. In another embodiment, the miRNA element is included within the 5′ untranslated region of the protein-coding sequence. In another embodiment, the miRNA element is included within the protein-coding sequence, for example between the start codon and the stop codon of the protein coding sequence. In another embodiment, the miRNA element is located between the protein-coding sequence and a polyadenylation sequence which is part of a 3′ untranslated region. In another embodiment, the miRNA element includes at least one miRNA initiator sequence. In another embodiment, the expression of a miRNA initiator sequence in a transgenic corn plant reduces the expression of an insecticidal protein of the invention in male reproductive tissue of the transgenic corn plant compared to non-male reproductive tissue in the transgenic corn, such leaf tissue. In other embodiments, expression of a miRNA initiator sequence of the invention in a transgenic corn plant increases the expression of an insecticidal protein of the invention in male reproductive tissue, such as pollen, of the transgenic corn plant compared to non-male reproductive tissue in the transgenic corn, such leaf tissue. In another embodiment, the miRNA element includes at least one sequence that encodes a miRNA initiator sequence selected from the group consisting of SEQ ID NO: 41-46 or SEQ ID NO: 98-101, which encode a miRNA initiator sequence selected from the group consisting of SEQ ID NO: 29-34 or SEQ ID NO: 94-97, respectively. In another embodiment, the miRNA element comprises a target insertion sequence comprising a miRNA initiator sequence and a synthetic nucleotide sequence flanking the 5′ and/or the 3′ end of the initiator sequence. In another embodiment, the target insertion sequence is selected from the group consisting of SEQ ID NO: 10-18 or SEQ ID NO: 79-83. In another embodiment, the expression of the recombinant insecticidal protein in a transgenic plant confers tolerance in at least vegetative tissues to feeding damage from insect pests. In another embodiment, the recombinant insecticidal protein is an insecticidal Cry protein or a vegetative insecticidal protein (Vip). In another embodiment, the insecticidal protein is a Cry1A protein or a Vip3A protein. In another embodiment the insecticidal protein is a Cry1Ab protein or a Vip3Aa protein. In another embodiment, the insecticidal protein comprises an amino acid sequence selected from the group consisting of SEQ ID NO: 61-66 or SEQ ID NO: 115-117.

[0016] Another aspect of the invention provides an expression cassette comprising a heterologous promoter operably linked to a recombinant insecticidal protein coding-sequence operably linked to a DNA sequence encoding a microRNA (miRNA) element of the invention that is male tissue-specific or male tissue-preferred in a corn plant. In one embodiment, the expression cassette comprises a sequence selected from the group consisting SEQ ID NO: 20-28 or SEQ ID NO: 85-93.

[0017] Another aspect of the invention provides a recombinant vector comprising a DNA construct of the invention. In one embodiment, the recombinant vector comprises a sequence selected from the group consisting of SEQ ID NO: 48-59 or SEQ ID NO: 105-113.

[0018] Another aspect of the invention provides a transgenic corn (maize; Zea mays) plant comprising a DNA construct and/or an expression cassette and/or a recombinant vector of the invention. In one embodiment, the invention provides transgenic seed, progeny or a plant part of the transgenic corn plant of the invention, wherein the transgenic seed, progeny or plant part comprises a DNA construct, expression cassette or recombinant vector of the invention.

[0019] Another aspect of the invention provides a method of making a DNA construct comprising identifying an endogenous male tissue-specific or male tissue-preferred corn microRNA (miRNA); constructing a miRNA element that encodes at least one miRNA initiator sequence that is recognized by the corn miRNA and operably linking the miRNA element to an insecticidal protein-coding sequence. In one embodiment, the male tissue-specific miRNA or male tissue-preferred miRNA is pollen-specific or pollen-preferred or tapetum-specific or tapetum preferred. In another embodiment, the male tissue-specific miRNA element or male tissue-preferred miRNA element is pollen-specific or pollen-preferred or tapetum-specific or tapetum preferred. In another embodiment, the miRNA element comprises a sequence selected from the group consisting of SEQ ID NO: 10-18 or SEQ ID NO: 79-83. In another embodiment, the miRNA element includes at least one sequence that encodes a miRNA initiator sequence selected from the group consisting of SEQ ID NO: 41-46 or SEQ ID NO: 98-101, which encode a miRNA initiator sequence selected from the group consisting of SEQ ID NO: 29-34 or SEQ ID NO: 94-97, respectively.

[0020] In a further aspect, the invention also provides a method of modulating and/or selectively reducing the expression of a recombinant insecticidal protein in a male reproductive cell or tissue of a transgenic corn plant by expressing in the transgenic corn plant a recombinant DNA construct comprising an insecticidal protein-coding sequence operably linked to a DNA sequence including an miRNA element of the invention. In one embodiment, the miRNA element includes at least one miRNA initiator sequence. In another embodiment, the miRNA element includes a target insertion sequence comprising a miRNA initiator sequence and a synthetic nucleotide sequence flanking the 5′ and/or the 3′ end of the initiator sequence. In another embodiment, the male reproductive tissue is pollen and/or tapetum. In another embodiment, the miRNA element includes at least one miRNA initiator sequence selected from the group consisting of SEQ ID NO: 41-46 or SEQ ID NO: 98-101, which encode a miRNA initiator sequence selected from the group consisting of SEQ ID NO: 29-34 or SEQ ID NO: 94-97, respectively. In another embodiment, the target insertion sequence is selected from the group consisting of SEQ ID NO: 10-18 or SEQ ID NO: 79-83. In another embodiment, the expression of the recombinant insecticidal protein in a transgenic corn plant confers tolerance in at least vegetative tissues to feeding damage from insect pests. In another embodiment, the recombinant insecticidal protein is an insecticidal Cry protein or a vegetative insecticidal protein (Vip). In another embodiment, the insecticidal protein is a Cry1A protein or a Vip3A protein. In another embodiment the insecticidal protein is a Cry1Ab protein or a Vip3Aa protein. In another embodiment, the insecticidal protein comprises an amino acid sequence selected from the group consisting of SEQ ID NO: 61-66 or SEQ ID NO: 115-117.

[0021] The invention also provides a method of increasing male fertility in a transgenic corn plant expressing a recombinant insecticidal protein that causes reduce male fertility or complete male sterility, including the step of inserting into a genome of a corn plant a recombinant DNA construct of the invention comprising a male sterility inducing insecticidal protein-coding sequence, operably linked to a DNA sequence including an miRNA element that modulates or selectively reduces the expression of the male sterility inducing insecticidal protein in a male reproductive cell or tissue, wherein the transgenic corn plant comprising the DNA construct has increased male fertility compared to a control plant not comprising the DNA construct. In one embodiment, the male sterility inducing protein is a Vip3 insecticidal protein. In another embodiment, the Vip3 protein is a Vip3Aa protein. In another embodiment, the Vip3 protein comprises an amino acid sequence selected from the group consisting of SEQ ID NO: 114-121.

[0022] The invention also provides a method for producing a Vip3-expressing corn plant having increased male fertility compared to a Vip3-expressing maize plant that has reduced male fertility or is male infertile, including: (a) providing a first Vip3-expressing corn plant comprising a recombinant DNA construct of the invention comprising a Vip3-coding sequence operably linked to a DNA sequence including an miRNA element that modulates or selectively reduces the expression of the Vip3 protein in a male reproductive cell or tissue; b) introgressing the recombinant DNA construct of (a) into a second corn plant; and c) selecting a Vip3-expressing corn plant comprising the recombinant DNA construct, wherein the miRNA element reduces the level of the Vip3 protein in a male reproductive tissue, thereby producing a Vip3-expressing corn plant with increased male fertility compared to a Vip3-expressing maize plant without the recombinant DNA construct.

[0023] The invention also provides a method of reducing the impact of pollen from a transgenic corn plant expressing at least one insecticidal protein on a non-target insect species susceptible to the insecticidal protein including the step of inserting into a genome of a corn plant a recombinant DNA construct of the invention comprising an insecticidal protein-coding sequence operably linked to a DNA sequence including an miRNA element that modulates or selectively reduces the expression of the insecticidal protein in pollen, wherein the pollen from the transgenic corn plant has decreased levels of the insecticidal protein compared to the vegetative tissue of the transgenic corn plant or to pollen from a control plant not comprising the DNA construct.

[0024] In another aspect, the invention provides provides a recombinant insecticidal protein that is active against a lepidopteran insect, wherein the insecticidal protein comprises an amino acid sequence that is encoded by a male tissue-specific or male tissue-preferred miRNA element, and wherein the miRNA element encodes at least one miRNA initiator sequence. In one embodiment, the insecticidal protein is a Cry1 protein or a Vip3 protein. In another embodiment, the Cry1 protein is a Cry1A protein or the Vip3 protein is a Vip3A protein. In another embodiment, the Cry1A protein is a Cry1Ab protein and the Vip3A protein is a Vip3Aa protein. In another embodiment, the amino acid sequence is selected from the group consisting of SEQ ID NO: 61-66 or SEQ ID NO: 115-117. In another embodiment, the recombinant insecticidal protein is active against a lepidopteran pest that is a European corn borer or a corn earworm. In another embodiment, the male tissue is pollen or tapetum. In another embodiment, the miRNA element comprises a sequence selected from the group consisting of SEQ ID NO: 10-18 or SEQ ID NO: 74-78. In another embodiment, the miRNA initiator sequence is selected from the group consisting of SEQ ID NO: 29-34 or SEQ ID NO: 94-97.

[0025] In another aspect, the invention provides a synthetic polynucleotide encoding a recombinant insecticidal protein of the invention. In one embodiment, the synthetic polynucleotide comprises a sequence selected from the group consisting of SEQ ID NO: 68-73 or SEQ ID NO: 118-121.

[0026] Other aspects and advantages of the present invention will become apparent to those skilled in the art from a study of the following description of the invention and non-limiting examples.

### BRIEF DESCRIPTION OF THE DRAWINGS

[0027] FIG. 1 depicts ELISA results of T0 plants as described in Example 6. Each bar represents the expression level of a Cry1Ab insecticidal protein as ng Cry1Ab/mg TSP (total soluble protein) in pollen (solid bar) and leaf (open bar). Error bars are ±Standard Error (SE)

### BRIEF DESCRIPTION OF THE SEQUENCES IN THE SEQUENCE LISTING

[0028] SEQ ID NO: 1 is an RNA sequence of a 24373miR159h-3p target insertion element.

[0029] SEQ ID NO: 2 is an RNA sequence of a 24374miR156i-3p target insertion element.

[0030] SEQ ID NO: 3 is an RNA sequence of a 24375miR171i-5p target insertion element.

[0031] SEQ ID NO: 4 is an RNA sequence of a 24376miR396b-3p target insertion element.

[0032] SEQ ID NO: 5 is an RNA sequence of a 24377miR396b-3p target insertion element.

[0033] SEQ ID NO: 6 is an RNA sequence of a 24379miR159h-3p target insertion element.

[0034] SEQ ID NO: 7 is an RNA sequence of a 24380miR156i-3p target insertion element.

[0035] SEQ ID NO: 8 is an RNA sequence of a 24381miR171i-5p target insertion element.

[0036] SEQ ID NO: 9 is an RNA sequence of a 24383miR396b-3p target insertion element.

[0037] SEQ ID NOs: 10 is a DNA sequence of a 24373miR159h-3p target insertion sequence.

[0038] SEQ ID NO: 11 is a DNA sequence of a 24374miR156i-3p target insertion sequence.

[0039] SEQ ID NO: 12 is a DNA sequence of a 24375miR171i-5p target insertion sequence.

[0040] SEQ ID NO: 13 is a DNA sequence of a 24376miR396b-3p target insertion sequence.

[0041] SEQ ID NO: 14 is a DNA sequence of a 24377miR396b-3p target insertion sequence.

[0042] SEQ ID NO: 15 is a DNA sequence of a 24379miR159h-3p target insertion sequence.

[0043] SEQ ID NO: 16 is a DNA sequence of a 24380miR156i-3p target insertion sequence.

[0044] SEQ ID NO: 17 is a DNA sequence of a 24381miR171i-5p target insertion sequence.

[0045] SEQ ID NO: 18 is a DNA sequence of a 24383miR396b-3p target insertion sequence.

[0046] SEQ ID NO: 19 is a 24366 cry1Ab expression cassette.

[0047] SEQ ID NO: 20 is a 24373 cry1Ab expression cassette.

[0048] SEQ ID NO: 21 is a 24374 cry1Ab expression cassette.

[0049] SEQ ID NO: 22 is a 24375 cry1Ab expression cassette.

[0050] SEQ ID NO: 23 is a 24376 cry1Ab expression cassette.

[0051] SEQ ID NO: 24 is a 24377 cry1Ab expression cassette.

[0052] SEQ ID NO: 25 is a 24379 cry1Ab expression cassette.

[0053] SEQ ID NO: 26 is a 24380 cry1Ab expression cassette.

[0054] SEQ ID NO: 27 is a 24381 cry1Ab expression cassette.

[0055] SEQ ID NO: 28 is a 24383 cry1Ab expression cassette.

[0056] SEQ ID NO: 29 is a motif miR159h3p initiator RNA sequence.

[0057] SEQ ID NO: 30 is a tgene miR159h-3p initiator RNA sequence.

[0058] SEQ ID NO: 31 is a motif miR156i-3p initiator RNA sequence.

[0059] SEQ ID NO: 32 is a motif miR171i-5p initiator RNA sequence.

[0060] SEQ ID NO: 33 is a motif miR396b-3p initiator RNA sequence.

[0061] SEQ ID NO: 34 is a tgene miR396b-3p initiator RNA sequence.

[0062] SEQ ID NO: 35 is a mutant miR159h-3p RNA sequence.

[0063] SEQ ID NO: 36 is a miR159h-3p RNA sequence.

[0064] SEQ ID NO: 37 is a miR156i-3p RNA sequence.

[0065] SEQ ID NO: 38 is a miR171i-5p RNA sequence.

[0066] SEQ ID NO: 39 is a miR396b-3p RNA sequence.

[0067] SEQ ID NO: 40 is a mutant miR396b-3p RNA sequence.

[0068] SEQ ID NO: 41 is a motif miR159h-3p initiator DNA sequence.

[0069] SEQ ID NO: 42 is a tgene miR159h-3p initiator DNA sequence.

[0070] SEQ ID NO: 43 is a motif miR156i-3p initiator DNA sequence.

[0071] SEQ ID NO: 44 is a motif miR171i-5p initiator DNA sequence.

[0072] SEQ ID NO: 45 is a motif miR396b-3p initiator DNA sequence.

[0073] SEQ ID NO: 46 is a tgene miR396b-3p initiator DNA sequence.

[0074] SEQ ID NO: 47 is a vector 24366 nucleotide sequence.

[0075] SEQ ID NO: 48 is a vector 24373 nucleotide sequence.

[0076] SEQ ID NO: 49 is a vector 24374 nucleotide sequence.

[0077] SEQ ID NO: 50 is a vector 24375 nucleotide sequence.

[0078] SEQ ID NO: 51 is a vector 24376 nucleotide sequence.

[0079] SEQ ID NO: 52 is a vector 24377 nucleotide sequence.

[0080] SEQ ID NO: 53 is a vector 24379 nucleotide sequence.

[0081] SEQ ID NO: 54 is a vector 24380 nucleotide sequence.

[0082] SEQ ID NO: 55 is a vector 24381 nucleotide sequence.

[0083] SEQ ID NO: 56 is a vector 24383 nucleotide sequence.

[0084] SEQ ID NO: 57 is a vector 24372 nucleotide sequence.

[0085] SEQ ID NO: 58 is a vector 24378 nucleotide sequence.

[0086] SEQ ID NO: 59 is a vector 24382 nucleotide sequence.

[0087] SEQ ID NO: 60 is a mCry1Ab-17 amino acid sequence.

[0088] SEQ ID NO: 61 is a 24373 mCry1Ab-17 amino acid sequence.

[0089] SEQ ID NO: 62 is a 24374 mCry1Ab-17 amino acid sequence.

[0090] SEQ ID NO: 63 is a 24375 mCry1Ab-17 amino acid sequence.

[0091] SEQ ID NO: 64 is a 24376 mCry1Ab-17 amino acid sequence.

[0092] SEQ ID NO: 65 is a 24377 mCry1Ab-17 amino acid sequence.

[0093] SEQ ID NO: 66 is a 24379 mCry1Ab-17 amino acid sequence.

[0094] SEQ ID NO: 67 is a mCry1Ab-17 nucleotide sequence.

[0095] SEQ ID NO: 68 is a 24373 mCry1Ab-17 nucleotide sequence.

[0096] SEQ ID NO: 69 is a 24374 mCry1Ab-17 nucleotide sequence.

[0097] SEQ ID NO: 70 is a 24375 mCry1Ab-17 nucleotide sequence.

[0098] SEQ ID NO: 71 is a 24376 mCry1Ab-17 nucleotide sequence.

[0099] SEQ ID NO: 72 is a 24377 mCry1Ab-17 nucleotide sequence.

[0100] SEQ ID NO: 73 is a 24379 mCry1Ab-17 nucleotide sequence.

[0101] SEQ ID NO: 74 is an RNA sequence of a 23708miR2275a-3p target insertion sequence.

[0102] SEQ ID NO: 75 is an RNA sequence of a 23711miR2275b-5p target insertion sequence.

[0103] SEQ ID NO: 76 is an RNA sequence of a miR2275b-3p target insertion sequence in vector 23712, 23713 and 23714.

[0104] SEQ ID NO: 77 is an RNA sequence of a 23715miR2275b-3p target insertion sequence.

[0105] SEQ ID NO: 78 is an RNA sequence of a 23716miR2275b-3p target insertion sequence.

[0106] SEQ ID NO: 79 is a DNA sequence of a 23708miR2275a-3p target insertion sequence.

[0107] SEQ ID NO: 80 is a DNA sequence of a 23711miR2275b-5p target insertion sequence.

[0108] SEQ ID NO: 81 is a DNA sequence of a miR2275b-3p target insertion sequence in vector 23712, 23713 and 23714.

[0109] SEQ ID NO: 82 is a DNA sequence of a 23715miR2275b-3p target insertion sequence.

[0110] SEQ ID NO: 83 is a DNA sequence of a 23716miR2275b-3p target insertion sequence.

[0111] SEQ ID NO: 84 is a 23705 vip3 expression cassette nucleotide sequence.

[0112] SEQ ID NO: 85 is a 23708 vip3 expression cassette nucleotide sequence.

[0113] SEQ ID NO: 86 is a 23711 vip3 expression cassette nucleotide sequence.

[0114] SEQ ID NO: 87 is a 23712 vip3 expression cassette nucleotide sequence.

[0115] SEQ ID NO: 88 is a 23713 vip3 expression cassette nucleotide sequence.

[0116] SEQ ID NO: 89 is a 23714 vip3 expression cassette nucleotide sequence.

[0117] SEQ ID NO: 90 is a 23715 vip3 expression cassette nucleotide sequence.

[0118] SEQ ID NO: 91 is a 23716 vip3 expression cassette nucleotide sequence.

[0119] SEQ ID NO: 92 is a 23717 vip3 expression cassette nucleotide sequence.

[0120] SEQ ID NO: 93 is a 23718 vip3 expression cassette nucleotide sequence.

[0121] SEQ ID NO: 94 is a miR2275a-3p initiator RNA sequence.

[0122] SEQ ID NO: 95 is a miR2275b-5p initiator RNA sequence.

[0123] SEQ ID NO: 96 is a miR2275b-3p initiator RNA sequence.

[0124] SEQ ID NO: 97 is a miR2275b-3p-target initiator RNA sequence.

[0125] SEQ ID NO: 98 is a miR2275a-3p initiator DNA sequence.

[0126] SEQ ID NO: 99 is a miR2275b-5p initiator DNA sequence.

[0127] SEQ ID NO: 100 is a miR2275b-3p initiator DNA sequence.

[0128] SEQ ID NO: 101 is a miR2275b-3p-target initiator DNA sequence.

[0129] SEQ ID NO: 102 is a miRNA2275b-3p RNA sequence.

[0130] SEQ ID NO: 103 is a miR2275b-5p RNA sequence.

[0131] SEQ ID NO: 104 is vector 23705 nucleotide sequence.

[0132] SEQ ID NO: 105 is vector 23708 nucleotide sequence.

[0133] SEQ ID NO: 106 is vector 23711 nucleotide sequence.

[0134] SEQ ID NO: 107 is vector 23712 nucleotide sequence.

[0135] SEQ ID NO: 108 is vector 23713 nucleotide sequence.

[0136] SEQ ID NO: 109 is vector 23714 nucleotide sequence.

[0137] SEQ ID NO: 110 is vector 23715 nucleotide sequence.

[0138] SEQ ID NO: 111 is vector 23716 nucleotide sequence.

[0139] SEQ ID NO: 112 is vector 23717 nucleotide sequence.

[0140] SEQ ID NO: 113 is vector 23718 nucleotide sequence.

[0141] SEQ ID NO: 114 is a 23705 Vip3 amino acid sequence.

[0142] SEQ ID NO: 115 is a 23716 Vip3 amino acid sequence.

[0143] SEQ ID NO: 116 is a 23717 Vip3 amino acid sequence.

[0144] SEQ ID NO: 117 is a 23718 Vip3 amino acid sequence.

[0145] SEQ ID NO: 118 is a 23705 Vip3 nucleotide sequence.

[0146] SEQ ID NO: 119 is a 23716 Vip3 nucleotide sequence.

[0147] SEQ ID NO: 120 is a 23717 Vip3 nucleotide sequence.

[0148] SEQ ID NO: 121 is a 23718 Vip3 nucleotide sequence.

[0149] SEQ ID NO: 122 is tgene input sequence.

[0150] SEQ ID NO: 123 is a tgene output sequence.

[0151] SEQ ID NO: 124 is a motif input sequence.

[0152] SEQ ID NO: 125 is a motif output sequence.

### DETAILED DESCRIPTION

[0153] This description is not intended to be a detailed catalog of all the different ways in which the invention may be implemented, or all the features that may be added to the instant invention. For example, features illustrated with respect to one embodiment may be incorporated into other embodiments, and features illustrated with respect to a particular embodiment may be deleted from that embodiment. Thus, the invention contemplates that in some embodiments of the invention, any feature or combination of features set forth herein can be excluded or omitted. In addition, numerous variations and additions to the various embodiments suggested herein will be apparent to those skilled in the art in light of the instant disclosure, which do not depart from the instant invention. Hence, the following descriptions are intended to illustrate some particular embodiments of the invention, and not to exhaustively specify all permutations, combinations and variations thereof.

[0154] Unless otherwise defined, all technical and scientific terms used herein have the same meaning as commonly understood by one of ordinary skill in the art to which this invention belongs. The terminology used in the description of the invention herein is for the purpose of describing particular embodiments only and is not intended to be limiting of the invention. Definitions of common terms in molecular biology may be found in Benjamin Lewin, Genes V, published by Oxford University Press, 1994 (ISBN 0-19-854287-9); Kendrew et al. (eds.), The Encyclopedia of Molecular Biology, published by Blackwell Science Ltd., 1994 (ISBN 0-632-02182-9); and Robert A. Meyers (ed.), Molecular Biology and Biotechnology: a Comprehensive Desk Reference, published by VCH Publishers, Inc., 1995 (ISBN 1-56081-569-8).

[0155] All publications, patent applications, patents and other references cited herein are incorporated by reference in their entireties for the teachings relevant to the sentence and/or paragraph in which the reference is presented.

[0156] Nucleotide sequences provided herein are presented in the 5′ to 3′ direction, from left to right and are presented using the standard code for representing nucleotide bases as set forth in 37 CFR §§ 1.821-1.825 and the World Intellectual Property Organization (WIPO) Standard ST.25, for example: adenine (A), cytosine (C), thymine (T), and guanine (G).

[0157] Amino acids are likewise indicated using the WIPO Standard ST.25, for example: alanine (Ala; A), arginine (Arg; R), asparagine (Asn; N), aspartic acid (Asp; D), cysteine (Cys; C), glutamine (Gln; Q), glutamic acid (Glu; E), glycine (Gly; G), histidine (His; H), isoleucine (Ile; l), leucine (Leu; L), lysine (Lys; K), methionine (Met; M), phenylalanine (Phe; F), proline (Pro; P), serine (Ser; S), threonine (Thr; T), tryptophan (Trp; W), tyrosine (Tyr; Y), and valine (Val; V).

[0158] Unless the context indicates otherwise, it is specifically intended that the various features of the invention described herein can be used in any combination. Moreover, the present invention also contemplates that in some embodiments of the invention, any feature or combination of features set forth herein can be excluded or omitted. To illustrate, if the specification states that a composition comprises components A, B and C, it is specifically intended that any of A, B or C, or a combination thereof, can be omitted and disclaimed singularly or in any combination.

[0159] For clarity, certain terms used in the specification are defined and presented as follows:

[0160] As used herein and in the appended claims, the singular forms “a,” “an,” and “the” include plural reference unless the context clearly dictates otherwise. Thus, for example, reference to “a plant” is a reference to one or more plants and includes equivalents thereof known to those skilled in the art, and so forth.

[0161] As used herein, the term “and/or” refers to and encompasses any and all possible combinations of one or more of the associated listed items, as well as the lack of combinations when interpreted in the alternative, “or.”

[0162] The term “about” is used herein to mean approximately, roughly, around, or in the region of. When the term “about” is used in conjunction with a numerical range, it modifies that range by extending the boundaries above and below the numerical values set forth. In general, the term “about” is used herein to modify a numerical value above and below the stated value by a variance of 20 percent, preferably 10 percent up or down (higher or lower). With regard to a temperature the term “about” means ±1° C., preferably ±0.5° C. Where the term “about” is used in the context of this invention (e.g., in combinations with temperature or molecular weight values) the exact value (i.e., without “about”) is preferred.

[0163] As used herein, the term “amplified” means the construction of multiple copies of a nucleic acid molecule or multiple copies complementary to the nucleic acid molecule using at least one of the nucleic acid molecules as a template. Amplification systems include the polymerase chain reaction (PCR) system, ligase chain reaction (LCR) system, nucleic acid sequence based amplification (NASBA, Cangene, Mississauga, Ontario), Q-Beta Replicase systems, transcription-based amplification system (TAS), and strand displacement amplification (SDA). See, e.g., Diagnostic Molecular Microbiology: Principles and Applications, PERSING et al., Ed., American Society for Microbiology, Washington, D.C. (1993). The product of amplification is termed an “amplicon.”

[0164] “Activity” of the insecticidal proteins of the invention is meant that the insecticidal proteins function as orally active insect control agents, have a toxic effect, and/or are able to disrupt or deter insect feeding, which may or may not cause death of the insect. When an insecticidal protein of the invention is delivered to the insect, the result is typically death of the insect, or the insect does not feed upon the source that makes the insecticidal protein available to the insect. “Pesticidal” is defined as a toxic biological activity capable of controlling a pest, such as an insect, nematode, fungus, bacteria, or virus, preferably by killing or destroying them. “Insecticidal” is defined as a toxic biological activity capable of controlling insects, preferably by killing them. A “pesticidal agent” is an agent that has pesticidal activity. An “insecticidal agent” is an agent that has insecticidal activity.

[0165] As used herein, the terms “backcross” and “backcrossing” refer to the process whereby a progeny plant is crossed back to one of its parents for one or more generations (e.g., 2 or more, 3 or more, 4 or more, 5 or more, 6 or more, or 7 or more times, etc.). In a backcrossing scheme, the “donor” parent refers to the parental plant with the desired gene or DNA construct or locus to be introgressed. The “recipient” parent (used one or more times) or “recurrent” parent (used two or more times) refers to the parental plant into which the gene or DNA construct or locus is being introgressed. For example, see Ragot et al. Marker-assisted Backcrossing: A Practical Example, in TECHNIQUES ET UTILISATIONS DES MARQUEURS MOLECULAIRES LES COLLOQUES, Vol. 72, pp. 45-56 (1995); and Openshaw et al., Marker-assisted Selection in Backcross Breeding, in PROCEEDINGS OF THE SYMPOSIUM “ANALYSIS OF MOLECULAR MARKER DATA,” pp. 41-43 (1994). The initial cross gives rise to the F1 generation. The term “BC1” refers to the second use of the recurrent parent, “BC2” refers to the third use of the recurrent parent, and so on. In embodiments, at least one or more generations of progeny are identified and/or selected for the presence of the desired gene or locus (e.g., in a nucleic acid sample from the progeny plant or plant part). In embodiments, two or more generations (or even all generations) of progeny are identified and/or selected for the presence of the desired gene or DNA construct or locus.

[0166] The term “chimeric construct” or “chimeric gene” or “chimeric polynucleotide” or “chimeric nucleic acid” or “chimeric protein” (or similar terms) as used herein refers to a construct or nucleic acid molecule or protein comprising two or more polynucleotides or amino acid motifs or domains, respectively, of different origin assembled into a single nucleic acid molecule or protein. The term “chimeric construct”, “chimeric gene”, “chimeric polynucleotide” or “chimeric nucleic acid” refers to any construct or molecule that contains, without limitation, (1) polynucleotides (e.g., DNA), including regulatory and coding polynucleotides that are not found together in nature (i.e., at least one of the polynucleotides in the construct is heterologous with respect to at least one of its other polynucleotides), or (2) polynucleotides encoding parts of proteins not naturally adjoined, or (3) parts of promoters that are not naturally adjoined. Further, a chimeric construct, chimeric gene, chimeric polynucleotide or chimeric nucleic acid may comprise regulatory polynucleotides and coding polynucleotides that are derived from different sources, or comprise regulatory polynucleotides and coding polynucleotides derived from the same source, but arranged in a manner different from that found in nature. In some embodiments of the invention, the chimeric construct, chimeric gene, chimeric polynucleotide or chimeric nucleic acid comprises an expression cassette comprising a polynucleotide of the invention under the control of regulatory polynucleotides, particularly under the control of regulatory polynucleotides functional in plants or bacteria.

[0167] A “coding sequence” is a nucleic acid sequence that is transcribed into RNA such as mRNA, rRNA, tRNA, snRNA, sense RNA or antisense RNA. In some aspects, the RNA is then translated in an organism, such as a corn plant, to produce a protein, e.g. an insecticidal protein of the invention. In other aspects, the RNA is not translated to produce a protein but functions as an RNA molecule to modulate expression of a recombinant insecticidal protein of the invention.

[0168] As used herein, the term “completely fertile” refers to a plant that is at least as fertile as a control plant (e.g., one or both of its parents, a near isogenic plant that lacks a vip3 coding sequence of the invention, and so forth). In some embodiments, “completely fertile” plants release at least as many pollen grains per tassel per day in the three-day period immediately following anther extrusion as the control plant. In some embodiments, “completely fertile” plants release more pollen grains per tassel per day in the three-day period immediately following anther extrusion than the control plant.

[0169] As used herein, a “codon optimized” sequence means a nucleotide sequence wherein the codons are chosen to reflect the particular codon bias that a host cell or organism may have. This is typically done in such a way so as to preserve the amino acid sequence of the polypeptide encoded by the nucleotide sequence to be optimized. In certain embodiments, a DNA sequence of a recombinant DNA construct of the invention includes codons optimized for a cell (e.g., an animal, plant, or fungal cell) in which the construct is to be expressed. For example, a construct to be expressed in a plant cell can have all or parts of its sequence (e.g., the first gene suppression element or the gene expression element) codon optimized for expression in a plant. See, for example, U.S. Pat. No. 6,121,014, incorporated herein by reference.

[0170] The terms “comprises” or “comprising,” when used in this specification, specify the presence of stated features, integers, steps, operations, elements, or components, but do not preclude the presence or addition of one or more other features, integers, steps, operations, elements, components, or groups thereof.

[0171] As used herein, the transitional phrase “consisting essentially of (and grammatical variants) means that the scope of a claim is to be interpreted to encompass the specified materials or steps recited in the claim” and those that do not materially alter the basic and novel characteristic(s)” of the claimed invention. Thus, the term “consisting essentially of” when used in a claim of this invention is not intended to be interpreted to be equivalent to “comprising.”

[0172] To “control” insects means to inhibit, through a toxic effect, the ability of insect pests to survive, grow, feed, or reproduce, or to limit insect-related damage or loss in crop plants or to protect the yield potential of a crop when grown in the presence of insect pests. To “control” insects may or may not mean killing the insects, although it preferably means killing the insects.

[0173] As used herein, the term “corn” is synonymous with the term “maize” or “Zea mays.”

[0174] In the context of the invention, “corresponding to” or “corresponds to” means that when the amino acid sequences of variant or homolog Cry proteins are aligned with each other, the amino acids that “correspond to” certain enumerated positions in the variant or homolog protein are those that align with these positions in a reference protein but that are not necessarily in these exact numerical positions relative to the particular reference amino acid sequence of the invention. For example, if SEQ ID NO: 114 is the reference sequence and is aligned with SEQ ID NO: 115, amino acid Phe at position 201 (Phe201) of SEQ ID NO: 115 “corresponds to” a Phe at position 183 (Phe183) of SEQ ID NO: 114, or for example, Glu199 of SEQ ID NO: 117 “corresponds to” Lys195 of SEQ ID NO: 114.

[0175] As used herein, the terms “cross” or “crossed” refer to the fusion of gametes via pollination to produce progeny (e.g., cells, seeds or plants). The term encompasses both sexual crosses (the pollination of one plant by another) and selfing (self-pollination, e.g., when the pollen and ovule are from the same plant). The term “crossing” refers to the act of fusing gametes via pollination to produce progeny.

[0176] The term “domain” refers to a set of amino acids conserved at specific positions along an alignment of sequences of evolutionarily related proteins. While amino acids at other positions can vary between homologues, amino acids that are highly conserved at specific positions indicate amino acids that are likely essential in the structure, stability or function of a protein. Identified by their high degree of conservation in aligned sequences of a family of protein homologues, they can be used as identifiers to determine if any polypeptide in question belongs to a previously identified polypeptide group.

[0177] “Effective insect-controlling amount” means that concentration of an insecticidal protein that inhibits, through a toxic effect, the ability of insects to survive, grow, feed and/or reproduce, or to limit insect-related damage or loss in crop plants. “Effective insect-controlling amount” may or may not mean killing the insects, although it preferably means killing the insects.

[0178] “Expression cassette” as used herein means a nucleic acid sequence capable of directing expression of a particular nucleotide sequence in an appropriate host cell, comprising a promoter operably linked to the nucleotide sequence of interest which is operably linked to termination signals. It also typically comprises sequences required for proper translation of the nucleotide sequence. The expression cassette comprising the nucleotide sequence of interest may have at least one of its components heterologous with respect to at least one of its other components. The expression cassette may also be one that is naturally occurring but has been obtained in a recombinant form useful for heterologous expression. Such usage of an expression cassette makes it so it is not naturally occurring in the cell into which it has been introduced. Typically, however, the expression cassette is heterologous with respect to the host, i.e., the particular nucleic acid sequence of the expression cassette does not occur naturally in the host cell and must have been introduced into the host cell or an ancestor of the host cell by a transformation process. The expression of the nucleotide sequence in the expression cassette may be under the control of a constitutive promoter or of an inducible promoter that initiates transcription only when the host cell is exposed to some particular external stimulus. In the case of a multicellular organism, such as a plant, the promoter can also be specific to a particular tissue, or organ, or stage of development.

[0179] An expression cassette also can optionally include a transcriptional and/or translational termination region (i.e., termination region) that is functional in plants. A variety of transcriptional terminators are available for use in expression cassettes and are responsible for the termination of transcription beyond the heterologous nucleotide sequence of interest and correct mRNA polyadenylation. The termination region may be native to the transcriptional initiation region, may be native to the operably linked nucleotide sequence of interest, may be native to the plant host, or may be derived from another source (i.e., foreign or heterologous to the promoter, the nucleotide sequence of interest, the plant host, or any combination thereof). Appropriate transcriptional terminators include, but are not limited to, the CAMV 35S terminator, the tml terminator, the nopaline synthase terminator and/or the pea rbcs E9 terminator. These can be used in both monocotyledons and dicotyledons. In addition, a coding sequence's native transcription terminator can be used. Any available terminator known to function in plants can be used in the context of the invention.

[0180] The term “expression” when used with reference to a polynucleotide, such as a gene, open reading frame (ORF) or portion thereof, or a transgene in plants, refers to the process of converting genetic information encoded in a gene into RNA (e.g., mRNA, rRNA, tRNA, or snRNA) through “transcription” of the gene (i.e., via the enzymatic action of an RNA polymerase), and into protein where applicable (e.g. if a gene encodes a protein), through “translation” of mRNA. Gene expression can be regulated at many stages in the process. For example, in the case of antisense or dsRNA constructs, respectively, expression may refer to the transcription of the antisense RNA only or the dsRNA only. In some embodiments of the invention, “expression” refers to the transcription and stable accumulation of sense (mRNA) or functional RNA. In some embodiments of the invention, “expression” refers to the production of protein.

[0181] A “gene” is a defined region that is located within a genome and comprises a coding nucleic acid sequence and typically also comprises other, primarily regulatory, nucleic acids responsible for the control of the expression, that is to say the transcription and translation, of the coding portion. A gene may also comprise other 5′ and 3′ untranslated sequences and termination sequences. Further elements that may be present are, for example, introns. The regulatory nucleic acid sequence of the gene may not normally be operatively linked to the associated nucleic acid sequence as found in nature and thus would be a chimeric gene.

[0182] “Gene of interest” refers to any nucleic acid molecule which, when transferred to a plant, confers upon the plant a desired trait such as antibiotic resistance, virus resistance, insect resistance, disease resistance, or resistance to other pests, herbicide tolerance, abiotic stress tolerance, male sterility, modified fatty acid metabolism, modified carbohydrate metabolism, improved nutritional value, improved performance in an industrial process or altered reproductive capability. The “gene of interest” may also be one that is transferred to plants for the production of commercially valuable enzymes or metabolites in the plant.

[0183] A “heterologous” nucleic acid sequence or nucleic acid molecule is a nucleic acid sequence or nucleic acid molecule not naturally associated with a host cell into which it is introduced, including non-naturally occurring multiple copies of a naturally occurring nucleic acid sequence. A heterologous nucleic acid sequence or nucleic acid molecule may comprise a chimeric sequence such as a chimeric expression cassette, where the promoter and the coding region are derived from multiple source organisms. The promoter sequence may be a constitutive promoter sequence, a tissue-specific promoter sequence, a chemically-inducible promoter sequence, a wound-inducible promoter sequence, a stress-inducible promoter sequence, or a developmental stage-specific promoter sequence.

[0184] A “homologous” nucleic acid sequence is a nucleic acid sequence naturally associated with a host cell into which it is introduced.

[0185] The term “identity” or “identical” or “substantially identical,” in the context of two nucleic acid or amino acid sequences, refers to two or more sequences or subsequences that have at least 60%, preferably at least 80%, more preferably 90%, even more preferably 95%, and most preferably at least 99% nucleotide or amino acid residue identity, when compared and aligned for maximum correspondence, as measured using one of the following sequence comparison algorithms or by visual inspection. Preferably, the substantial identity exists over a region of the sequences that is at least about 50 residues or bases in length, more preferably over a region of at least about 100 residues or bases, and most preferably the sequences are substantially identical over at least about 150 residues or bases. In an especially preferred embodiment, the sequences are substantially identical over the entire length of the coding regions. Furthermore, substantially identical nucleic acid or amino acid sequences perform substantially the same function.

[0186] For sequence comparison, typically one sequence acts as a reference sequence to which test sequences are compared. When using a sequence comparison algorithm, test and reference sequences are input into a computer, subsequence coordinates are designated if necessary, and sequence algorithm program parameters are designated. The sequence comparison algorithm then calculates the percent sequence identity for the test sequence(s) relative to the reference sequence, based on the designated program parameters.

[0187] Optimal alignment of sequences for comparison can be conducted, e.g., by the local homology algorithm of Smith & Waterman, Adv. Appl. Math. 2: 482 (1981), by the homology alignment algorithm of Needleman & Wunsch, J. Mol. Biol. 48: 443 (1970), by the search for similarity method of Pearson & Lipman, Proc. Nat'l. Acad Sci. USA 85: 2444 (1988), by computerized implementations of these algorithms (GAP, BESTFIT, FASTA, and TFASTA in the Wisconsin Genetics Software Package, Genetics Computer Group, 575 Science Dr., Madison, Wis.), or by visual inspection (see generally, Ausubel et al., infra).

[0188] One example of an algorithm that is suitable for determining percent sequence identity and sequence similarity is the BLAST algorithm, which is described in Altschul et al., J. Mol. Biol. 215: 403-410 (1990). Software for performing BLAST analyses is publicly available through the National Center for Biotechnology Information (National Center for Biotechnology Information, U.S. National Library of Medicine, 8600 Rockville Pike, Bethesda, Md. 20894 USA). This algorithm involves first identifying high scoring sequence pairs (HSPs) by identifying short words of length W in the query sequence, which either match or satisfy some positive-valued threshold score T when aligned with a word of the same length in a database sequence. T is referred to as the neighborhood word score threshold (Altschul et al., 1990). These initial neighborhood word hits act as seeds for initiating searches to find longer HSPs containing them. The word hits are then extended in both directions along each sequence for as far as the cumulative alignment score can be increased. Cumulative scores are calculated using, for nucleotide sequences, the parameters M (reward score for a pair of matching residues; always>0) and N (penalty score for mismatching residues; always<0). For amino acid sequences, a scoring matrix is used to calculate the cumulative score. Extension of the word hits in each direction are halted when the cumulative alignment score falls off by the quantity X from its maximum achieved value, the cumulative score goes to zero or below due to the accumulation of one or more negative-scoring residue alignments, or the end of either sequence is reached. The BLAST algorithm parameters W, T, and X determine the sensitivity and speed of the alignment. The BLASTN program (for nucleotide sequences) uses as defaults a wordlength (W) of 11, an expectation (E) of 10, a cutoff of 100, M=5, N=−4, and a comparison of both strands. For amino acid sequences, the BLASTP program uses as defaults a wordlength (W) of 3, an expectation (E) of 10, and the BLOSUM62 scoring matrix (see Henikoff & Henikoff, Proc. Natl. Acad Sci. USA 89: 10915 (1989)).

[0189] In addition to calculating percent sequence identity, the BLAST algorithm also performs a statistical analysis of the similarity between two sequences (see, e.g., Karlin & Altschul, Proc. Nat'l. Acad. Sci. USA 90: 5873-5787 (1993)). One measure of similarity provided by the BLAST algorithm is the smallest sum probability (P(N)), which provides an indication of the probability by which a match between two nucleotide or amino acid sequences would occur by chance. For example, a test nucleic acid sequence is considered similar to a reference sequence if the smallest sum probability in a comparison of the test nucleic acid sequence to the reference nucleic acid sequence is less than about 0.1, more preferably less than about 0.01, and most preferably less than about 0.001.

[0190] Another indication that two nucleic acid sequences are substantially identical is that the two molecules hybridize to each other under stringent conditions. The phrase “hybridizing specifically to” refers to the binding, duplexing, or hybridizing of a molecule only to a particular nucleotide sequence under stringent conditions when that sequence is present in a complex mixture (e.g., total cellular) DNA or RNA. “Bind(s) substantially” refers to complementary hybridization between a probe nucleic acid and a target nucleic acid and embraces minor mismatches that can be accommodated by reducing the stringency of the hybridization media to achieve the desired detection of the target nucleic acid sequence.

[0191] “Stringent hybridization conditions” and “stringent hybridization wash conditions” in the context of nucleic acid hybridization experiments such as Southern and Northern hybridizations are sequence dependent, and are different under different environmental parameters. Longer sequences hybridize specifically at higher temperatures. An extensive guide to the hybridization of nucleic acids is found in Tijssen (1993) Laboratory Techniques in Biochemistry and Molecular Biology-Hybridization with Nucleic Acid Probes part I chapter 2 “Overview of principles of hybridization and the strategy of nucleic acid probe assays” Elsevier, New York. Generally, highly stringent hybridization and wash conditions are selected to be about 5° C. lower than the thermal melting point (Tₘ) for the specific sequence at a defined ionic strength and pH. Typically, under “stringent conditions” a probe will hybridize to its target subsequence, but not to other sequences.

[0192] The Tₘ is the temperature (under defined ionic strength and pH) at which 50% of the target sequence hybridizes to a perfectly matched probe. Very stringent conditions are selected to be equal to the Tₘ for a particular probe. An example of stringent hybridization conditions for hybridization of complementary nucleic acids which have more than 100 complementary residues on a filter in a Southern or northern blot is 50% formamide with 1 mg of heparin at 42° C., with the hybridization being carried out overnight. An example of highly stringent wash conditions is 0.15M NaCl at 72° C. for about 15 minutes. An example of stringent wash conditions is a 0.2×SSC wash at 65° C. for 15 minutes (see, Sambrook, infra, for a description of SSC buffer). Often, a high stringency wash is preceded by a low stringency wash to remove background probe signal. An example medium stringency wash for a duplex of, e.g., more than 100 nucleotides, is 1×SSC at 45° C. for 15 minutes. An example low stringency wash for a duplex of, e.g., more than 100 nucleotides, is 4-6×SSC at 40° C. for 15 minutes. For short probes (e.g., about 10 to 50 nucleotides), stringent conditions typically involve salt concentrations of less than about 1.0 M Na ion, typically about 0.01 to 1.0 M Na ion concentration (or other salts) at pH 7.0 to 8.3, and the temperature is typically at least about 30° C. Stringent conditions can also be achieved with the addition of destabilizing agents such as formamide. In general, a signal to noise ratio of 2× (or higher) than that observed for an unrelated probe in the particular hybridization assay indicates detection of a specific hybridization. Nucleic acids that do not hybridize to each other under stringent conditions are still substantially identical if the proteins that they encode are substantially identical. This occurs, e.g., when a copy of a nucleic acid is created using the maximum codon degeneracy permitted by the genetic code.

[0193] The following are examples of sets of hybridization/wash conditions that may be used to clone homologous nucleotide sequences that are substantially identical to reference nucleotide sequences of the present invention: a reference nucleotide sequence preferably hybridizes to the reference nucleotide sequence in 7% sodium dodecyl sulfate (SDS), 0.5 M NaPO₄, 1 mM EDTA at 50° C. with washing in 2×SSC, 0.1% SDS at 50° C., more desirably in 7% sodium dodecyl sulfate (SDS), 0.5 M NaPO₄, 1 mM EDTA at 50° C. with washing in 1×SSC, 0.1% SDS at 50° C., more desirably still in 7% sodium dodecyl sulfate (SDS), 0.5 M NaPO₄, 1 mM EDTA at 50° C. with washing in 0.5×SSC, 0.1% SDS at 50° C., preferably in 7% sodium dodecyl sulfate (SDS), 0.5 M NaPO₄, 1 mM EDTA at 50° C. with washing in 0.1×SSC, 0.1% SDS at 50° C., more preferably in 7% sodium dodecyl sulfate (SDS), 0.5 M NaPO₄, 1 mM EDTA at 50° C. with washing in 0.1×SSC, 0.1% SDS at 65° C.

[0194] A further indication that two nucleic acid sequences or proteins are substantially identical is that the protein encoded by the first nucleic acid is immunologically cross reactive with, or specifically binds to, the protein encoded by the second nucleic acid. Thus, a protein is typically substantially identical to a second protein, for example, where the two proteins differ only by conservative substitutions.

[0195] The term “isolated” nucleic acid molecule, polynucleotide or protein is a nucleic acid molecule, polynucleotide or protein that no longer exists in its natural environment. An isolated nucleic acid molecule, polynucleotide or protein of the invention may exist in a purified form or may exist in a recombinant host such as in a transgenic bacteria or a transgenic plant. Therefore, a claim to an “isolated” nucleic acid molecule, as enumerated herein, encompasses a nucleic acid molecule that is comprised within a transgenic plant genome.

[0196] As used herein, the term “microRNA” (miRNA) refers to small, non-coding RNA gene products of approximately 18-26 nucleotides in length and found in diverse organisms, including animals and plants. miRNAs structurally resemble siRNAs except that they arise from structured, foldback-forming precursor transcripts derived from miRNA genes. Primary transcripts of miRNA genes form hairpin structures that are processed by the multidomain RNaseIII-like nuclease DICER and DROSHA (in animals) or DICER-LIKE1 (DCL1; in plants) to yield miRNA duplexes. The mature miRNA is incorporated into RISC complexes after duplex unwinding Plant miRNAs interact with their RNA targets by first binding to an initiator sequence that has perfect or near perfect complementarity to the miRNA.

[0197] A “nucleic acid molecule” or “nucleic acid sequence” is a segment of single- or double-stranded DNA or RNA that can be isolated from any source. In the context of the invention, the nucleic acid molecule is typically a segment of DNA. In some embodiments, the nucleic acid molecules of the invention are isolated nucleic acid molecules.

[0198] “Operably linked” refers to the association of polynucleotides on a single nucleic acid fragment so that the function of one affects the function of the other. For example, a promoter is operably linked with a coding polynucleotide or functional RNA when it is capable of affecting the expression of that coding polynucleotide or functional RNA (i.e., that the coding polynucleotide or functional RNA is under the transcriptional control of the promoter). Coding polynucleotides in sense or antisense orientation can be operably linked to regulatory polynucleotides.

[0199] As used herein “pesticidal,” insecticidal,” and the like, refer to the ability of a Cry protein or a vegetative insecticidal protein (Vip) of the invention to control a pest organism or an amount of a Cry protein or Vip that can control a pest organism as defined herein. Thus, a pesticidal Cry protein or Vip can kill or inhibit the ability of a pest organism (e.g., insect pest) to survive, grow, feed, or reproduce.

[0200] The terms “protein,” “peptide” and “polypeptide” are used interchangeably herein.

[0201] A “plant” is any plant at any stage of development, particularly a seed plant.

[0202] A “plant cell” is a structural and physiological unit of a plant, comprising a protoplast and a cell wall. The plant cell may be in the form of an isolated single cell or a cultured cell, or as a part of a higher organized unit such as, for example, plant tissue, a plant organ, or a whole plant.

[0203] “Plant cell culture” means cultures of plant units such as, for example, protoplasts, cell culture cells, cells in plant tissues, pollen, pollen tubes, ovules, embryo sacs, zygotes and embryos at various stages of development.

[0204] “Plant material” refers to leaves, stems, roots, flowers or flower parts, fruits, pollen, egg cells, zygotes, seeds, cuttings, cell or tissue cultures, or any other part or product of a plant.

[0205] A “plant organ” is a distinct and visibly structured and differentiated part of a plant such as a root, stem, leaf, flower bud, or embryo.

[0206] “Plant tissue” as used herein means a group of plant cells organized into a structural and functional unit. Any tissue of a plant in planta or in culture is included. This term includes, but is not limited to, whole plants, plant organs, plant seeds, tissue culture and any groups of plant cells organized into structural and/or functional units. The use of this term in conjunction with, or in the absence of, any specific type of plant tissue as listed above or otherwise embraced by this definition is not intended to be exclusive of any other type of plant tissue. For example, the “tapetum” is a tissue within the sporangium, especially the anther, of corn plants that provides nutrition for growing spores.

[0207] A “polynucleotide” refers to a polymer composed of many nucleotide monomers covalently bonded in a chain. Such “polynucleotides” includes DNA, RNA, modified oligo nucleotides (e.g., oligonucleotides comprising bases that are not typical to biological RNA or DNA, such as 2′-O-methylated oligonucleotides), and the like. In some embodiments, a nucleic acid or polynucleotide can be single-stranded, double-stranded, multi-stranded, or combinations thereof. Unless otherwise indicated, a particular nucleic acid or polynucleotide of the present invention optionally comprises or encodes complementary polynucleotides, in addition to any polynucleotide explicitly indicated.

[0208] “Polynucleotide of interest” refers to any polynucleotide which, when transferred to an organism, e.g., a plant, confers upon the organism a desired characteristic such as insect resistance, disease resistance, herbicide tolerance, antibiotic resistance, improved nutritional value, improved performance in an industrial process, production of commercially valuable enzymes or metabolites or altered reproductive capability.

[0209] A “promoter” is an untranslated DNA sequence upstream of the coding region that contains the binding site for RNA polymerase and initiates transcription of the DNA. The promoter region may also include other elements that act as regulators of gene expression.

[0210] As used herein, the term “recombinant” refers to a form of nucleic acid (e.g., DNA or RNA) or protein or an organism that would not normally be found in nature and as such was created by human intervention. As used herein, a “recombinant nucleic acid molecule” is a nucleic acid molecule comprising a combination of polynucleotides that would not naturally occur together and is the result of human intervention, e.g., a nucleic acid molecule that is comprised of a combination of at least two polynucleotides heterologous to each other, or a nucleic acid molecule that is artificially synthesized, for example, a polynucleotide synthesize using an assembled nucleotide sequence, and comprises a polynucleotide that deviates from the polynucleotide that would normally exist in nature, or a nucleic acid molecule that comprises a transgene artificially incorporated into a host cell's genomic DNA and the associated flanking DNA of the host cell's genome. Another example of a recombinant nucleic acid molecule is a DNA molecule resulting from the insertion of a transgene into a plant's genomic DNA, which may ultimately result in the expression of a recombinant RNA or protein molecule in that organism. As used herein, a “recombinant plant” is a plant that would not normally exist in nature, is the result of human intervention, and contains a transgene or heterologous nucleic acid molecule incorporated into its genome. As a result of such genomic alteration, the recombinant plant is distinctly different from the related wild-type plant.

[0211] “Regulatory elements” refer to sequences involved in controlling the expression of a nucleotide sequence. Regulatory elements comprise a promoter operably linked to the nucleotide sequence of interest and termination signals. They also typically encompass sequences required for proper translation of the nucleotide sequence.

[0212] “Transformation” is a process for introducing heterologous nucleic acid into a host cell or organism. In particular embodiments, “transformation” means the stable integration of a DNA molecule into the genome (nuclear or plastid) of an organism of interest.

[0213] “Transformed/transgenic/recombinant” refer to a host organism such as a bacterium or a plant into which a heterologous nucleic acid molecule has been introduced. The nucleic acid molecule can be stably integrated into the genome of the host or the nucleic acid molecule can also be present as an extrachromosomal molecule. Such an extrachromosomal molecule can be auto-replicating. Transformed cells, tissues, or plants are understood to encompass not only the end product of a transformation process, but also transgenic progeny thereof. A “non-transformed”, “non-transgenic”, or “non-recombinant” host refers to a wild-type organism, e.g., a bacterium or plant, which does not contain the heterologous nucleic acid molecule.

[0214] The invention relates generally to methods of modulating, for example reducing, recombinant insecticidal protein expression in male reproductive cells and/or tissues of transgenic plants, recombinant DNA constructs useful in such methods, as well as transgenic plants, plant parts, cells, and seeds containing such recombinant DNA constructs. The recombinant DNA constructs and the transgenic plants, plant parts, cells, and seeds containing such constructs provide a greatly improved way to minimize any potential risks to non-pest insect species associated with expression of insecticidal proteins in pollen or for mitigating the impact that expression of insecticidal proteins in pollen and/or tapetum may have on male fertility in transgenic plants.

[0215] In some embodiments, the invention provides a recombinant DNA construct that comprises an insecticidal protein-coding sequence operably linked to a DNA sequence encoding a microRNA (miRNA) element that is capable of binding to a plant microRNA that is male tissue-specific or male tissue-preferred in a corn plant, i.e. a chimeric transgene including an insecticidal protein-coding sequence encoding the recombinant insecticidal protein and at least one miRNA element comprising at least one male tissue-specific or male tissue-preferred miRNA initiator sequence operably linked to the protein-coding sequence. In other embodiments, the recombinant DNA construct is useful for suppressing the expression of a recombinant insecticidal protein in a male reproductive tissue of a transgenic plant, such as a transgenic corn plant. In other embodiments, the invention provides a recombinant DNA molecule comprising the recombinant DNA construct and methods of use thereof. Nucleic acid sequences of the invention can be provided as DNA or as RNA, as specified; disclosure of one necessarily defines the other, as is known to one of ordinary skill in the art. Furthermore, disclosure of a given nucleic acid sequence necessarily defines the exact complement of that sequence, as is known to one of ordinary skill in the art.

[0216] A “male tissue-specific or “male tissue-preferred” miRNA initiator sequence is a small RNA of about 18 to about 26 nucleotides (e.g., 18, 19, 20, 21, 22, 23, 24, 25 or 26 nucleotides) that is recognized and bound by an endogenous plant microRNA that is enriched (male tissue-preferred) or specifically expressed (male tissue-specific) in one or more male reproductive tissue(s) (e.g., pollen and/or tapetum) of a plant, i.e., having a male tissue-specific or male tissue-preferred expression pattern. Male tissue-specific or male tissue-preferred miRNAs are naturally occurring in plants and can be detected using techniques known in the art, such as low molecular weight northern analysis. Examples of miRNA initiator sequences for endogenous corn plant microRNAs are provided as SEQ ID NO: 29-34 and SEQ ID NO: 94-97. Examples of DNA sequences that encode such miRN initiator sequences are provided as SEQ ID NO: 41-46 and SEQ ID NO: 98-101, respectively. In some embodiments, a miRNA initiator sequence is the exact DNA complement (with no mismatches) to a given male tissue-specific or male tissue-preferred microRNA. Such miRNA initiator sequences are designated herein as “motif” sequences. In other embodiments, a miRNA initiator sequence varies by at least 1-3 nucleotide mismatches compared to a given male tissue-specific or male tissue-preferred microRNA, which are designated herein as “tgene” sequences because the design of the initiator sequence is based on the predicted sequence of an endogenous target gene. These “tgene” miRNA initiator sequences nonetheless have sufficient complementarity to bind or hybridize, e.g., under typical physiological conditions, to the intended microRNA. “Complementarity” refers to the capability of nucleotides on one polynucleotide strand to base-pair with nucleotides on another polynucleotide strand according to the standard Watson-Crick complementarity rules (i.e., guanine pairs with cytosine (G:C) and adenine pairs with either thymine (A:T) or uracil (A:U); it is possible for intra-strand hybridization to occur between two or more complementary regions of a single polynucleotide. When included in a recombinant DNA construct as described herein, a miRNA initiator sequence is capable of RNAi-mediated suppression or disruption of the expression of a transgene RNA or the expression of a recombinant protein, such as a recombinant insecticidal protein.

[0217] In some embodiments of the invention, a microRNA of the invention and thus a miRNA initiator sequence of the invention is selectively or preferentially functional in pollen tissue or tapetum tissue.

[0218] In some embodiments of the invention, a DNA construct of the invention comprises a miRNA element within a 5′ untranslated region of an insecticidal protein-coding sequence. In other embodiments, a DNA construct of the invention comprises a miRNA element within a 3′ untranslated region of an insecticidal protein-coding sequence. In still other embodiments, a DNA construct of the invention comprises a miRNA element within an insecticidal protein-coding sequence between the start and stop codons. In other embodiments, the miRNA element is located between the protein-coding sequence and a polyadenylation sequence which is part of a 3′ untranslated region.

[0219] In some embodiments of the invention, a DNA construct of the invention comprises at least one, at least two, at least three, or more than three miRNA elements. Each of the miRNA elements may comprise at least one, at least two, at least three, or more than three miRNA initiator sequence(s). A miRNA element may be any length but preferably they are from about 40 nucleotides to about 80 nucleotides. In other embodiments, a miRNA element of the invention comprises a sequence that encodes a miRNA initiator sequence selected from the group consisting of SEQ ID NO: 29-34 or SEQ ID NO: 94-97. In other embodiments, a sequence that encodes a miRNA initiator sequence of the invention is selected from the group consisting of SEQ ID NO: 41-46 or SEQ ID NO: 98-101. In still other embodiments, the miRNA element comprises a target insertion sequence comprising a miRNA initiator sequence and a synthetic nucleotide sequence flanking the 5′ and/or the 3′ end of the initiator sequence. Such flanking sequences may be useful for allowing a microRNA to have better access to the miRNA initiator sequence. On the 5′ end of the initiator sequence, flank size can be about 40, or about 30, or about 20, 19, 18, 17, 16 or 15 nucleotides, but preferably 17 nucleotides. On the 3′ end of the initiator sequence flank size can range from about 40, or about 30, or about 20, 19, 18, 17, 16, 15, 13, 12 or 11 nucleotides, but preferably 13 nucleotides. In other embodiments, a sequence that comprises an initiator sequence of the invention and synthetic flanking sequences on the 5′ and/or 3′ end of the initiator sequence is a target insertion sequence of the invention. In other embodiments, a target insertion sequence is selected from the group consisting of SEQ ID NO: 10-18 or SEQ ID NO: 79-83. Thus, a miRNA element of the invention may comprise only a miRNA initiator sequence or it may comprise a target insertion sequence and any combination thereof.

[0220] In some embodiments, the miRNA elements of the invention are synthesized or modified in vitro to contain more, fewer, or different miRNA initiator sequences or flanking sequences and/or to rearrange the relative position of one or more miRNA initiator sequence(s) or flanking sequences, where such a modification is beneficial in increasing or decreasing the effect of the miRNA element. Methods for synthesizing or for in vitro modification of a miRNA element and determining the optimal variation for the desired level of suppression are known by those of skill in the art. Chimeric miRNA elements can also be designed using methods known to those of skill in the art, such as by inserting additional desired miRNA initiator sequences internally in an miRNA element or by linking additional miRNA initiator sequences 5′ or 3′ to an miRNA element.

[0221] In some embodiments, expression of a miRNA initiator sequence in a transgenic corn plant reduces the expression of a recombinant insecticidal protein of the invention in male reproductive tissue, such as pollen and/or tapetum, of the transgenic corn plant compared to non-male reproductive tissue in the transgenic corn, such leaf tissue. Reduction of recombinant insecticidal protein expression in a cell or tissue as used herein refers to the decreased or suppressed level of a recombinant insecticidal protein in a cell or tissue as compared to a reference cell or tissue by at least about 25%, at least about 35, at least about 45%, at least about 55%, at least about 65%, at least about 75%, at least about 80%, at least about 85%, at least about 90%, at least about 95%, or at least about 99%. A reference cell or tissue can be, e.g., a vegetative cell or tissue from the same or a similar transgenic plant expressing the recombinant insecticidal protein, or e.g., a vegetative cell or tissue from a transgenic plant having a similar transgene for expressing the recombinant insecticidal protein but lacking the miRNA element. Reduction in insecticidal protein expression can be determined using any technique known to one skilled in the art, such as by directly measuring protein accumulation in a cell or tissue sample using a technique such as ELISA or western blot analysis, by measuring biological activity of the insecticidal protein, or by phenotypically determining insecticidal protein expression. In some embodiments, reduction of recombinant insecticidal protein refers to a sufficient reduction in expression of a recombinant insecticidal protein in a male reproductive tissue of a transgenic corn plant, resulting in a detectable phenotype of increased male fertility in the transgenic corn plant compared to a suitable control corn plant. The detection of increased male fertility in such a transgenic corn plant would therefore indicate the selective reduction of the recombinant insecticidal protein.

[0222] In other embodiments, expression of a miRNA initiator sequence of the invention in a transgenic corn plant increases the expression of a recombinant insecticidal protein of the invention in male reproductive tissue, such as pollen or tapetum, of the transgenic corn plant compared to non-male reproductive tissue in the transgenic corn, such leaf tissue. Increased recombinant insecticidal protein expression in a cell or tissue as used herein refers to the increased level of a recombinant insecticidal protein in a cell or tissue as compared to a reference cell or tissue by at least about 25%, at least about 35, at least about 45%, at least about 55%, at least about 65%, at least about 75%, at least about 80%, at least about 85%, at least about 90%, at least about 95%, or at least about 99%. A reference cell or tissue can be, e.g., a vegetative cell or tissue from the same or a similar transgenic plant expressing the recombinant insecticidal protein, or e.g., a vegetative cell or tissue from a transgenic plant having a similar transgene for expressing the recombinant insecticidal protein but lacking the miRNA element. An increase in insecticidal protein expression can be determined using any technique known to one skilled in the art, such as by directly measuring protein accumulation in a cell or tissue sample using a technique such as ELISA or western blot analysis, by measuring biological activity of the insecticidal protein, or by phenotypically determining insecticidal protein expression.

[0223] In some embodiments, expression in a transgenic corn plant of a recombinant insecticidal protein encoded by a DNA construct of the invention confers insect pest tolerance to the transgenic corn plant in at least vegetative tissues. Such tolerance results from the insecticidal protein causing a reduction in feeding or growth of the insect pest or causes death of the insect pest. In some embodiments, a DNA construct of the invention encodes a recombinant Cry1 insecticidal protein or a recombinant Vip3 insecticidal protein. In other embodiments, the Cry1 protein is a Cry1A insecticidal protein or the Vip3 protein is a Vip3A insecticidal protein. In still other embodiments, the Cry1A protein is a Cry1Ab insecticidal protein or the Vip3A protein is a Vip3Aa insecticidal protein. In still further embodiments, the Cry1Ab insecticidal protein comprises an amino acid sequence selected from the group consisting of SEQ ID NO: 61-66. In still further embodiments, the Vip3Aa protein comprises an amino acid sequence selected from the group consisting of SEQ ID NO: 115-117.

[0224] In some embodiments, a recombinant DNA construct of the invention comprises an expression cassette comprising a heterologous promoter operably linked to a recombinant insecticidal protein coding-sequence operably linked to a DNA sequence encoding a microRNA (miRNA) element of the invention that is male tissue-specific or male tissue-preferred in a corn plant. In one embodiment, the expression cassette comprises a sequence selected from the group consisting SEQ ID NO: 20-28 or SEQ ID NO: 85-93.

[0225] In some embodiments, the invention provides a recombinant vector comprising a DNA construct of the invention. In other embodiments, the vector comprises a sequence selected from the group consisting of SEQ ID NO: 49-59 or SEQ ID NO: 105-113.

[0226] In some embodiments, the invention provides a transgenic corn (maize; Zea mays) plant comprising a DNA construct and/or an expression cassette and/or a recombinant vector of the invention. In other embodiments, the invention provides transgenic seed, progeny or a plant part of the transgenic corn plant of the invention, wherein the transgenic seed, progeny or plant part comprises a DNA construct, expression cassette or recombinant vector of the invention.

[0227] In some embodiments, the invention provides a method of making a DNA construct comprising identifying an endogenous male tissue-specific or male tissue-preferred corn microRNA (miRNA); constructing a miRNA element that encodes at least one miRNA initiator sequence that is recognized by said corn miRNA and operably linking said miRNA element to an insecticidal protein-coding sequence. In other embodiments, the male tissue-specific microRNA or male tissue-preferred microRNA is pollen-specific or pollen-preferred or tapetum-specific or tapetum preferred. In other embodiments, the male tissue-specific miRNA element or male tissue-preferred miRNA element is pollen-specific or pollen-preferred or tapetum-specific or tapetum preferred. In other embodiments, the miRNA element comprises a target insertion sequence. In still other embodiments, the target insertion sequence comprises a sequence selected from the group consisting of SEQ ID NO: 10-18 or SEQ ID NO: 79-83. In still further embodiments, the miRNA initiator sequence encoded by said miRNA element comprises a sequence selected from the group consisting of SEQ ID NO: 29-34 or SEQ ID NO: 94-97.

[0228] In some embodiments, the invention provides a method of reducing the expression of a recombinant insecticidal protein in a male reproductive tissue of a transgenic corn plant comprising expressing in the transgenic corn plant a DNA construct comprising an insecticidal protein-coding sequence encoding the recombinant insecticidal protein and at least a first male tissue-specific miRNA element or a male tissue-preferred miRNA element operably linked to the insecticidal protein-coding sequence, wherein the miRNA element encodes at least one miRNA initiator sequence. In other embodiments, the miRNA element is comprised within a 5′ untranslated region of the insecticidal protein-coding sequence, or within a 3′ untranslated region of the insecticidal protein-coding sequence or within the insecticidal protein-coding sequence between the start and stop codons. In other embodiments, the miRNA element comprises at least two, at least three, or more than three miRNA initiator sequences. In still other embodiments, the male tissue is pollen and/or tapetum. In still other embodiments, the miRNA initiator sequence is selected from the group consisting of SEQ ID NO: 29-34 or SEQ ID NO: 94-97. In still other embodiments, the miRNA element comprises a target insertion sequence that is selected from the group consisting of SEQ ID NO: 10-18 or SEQ ID NO: 79-83.

[0229] In some embodiments of a method to selectively reduce the expression of a recombinant insecticidal protein in male reproductive tissue of a transgenic corn plant, the expression of the insecticidal protein in the transgenic corn plant confers insect pest tolerance to the corn plant in at least the vegetative tissue, such as leaf tissue, of the plant. In other embodiments, the insecticidal protein-coding sequence encodes a Cry1 protein or a Vip3 protein. In other embodiments, the insecticidal protein-coding sequence encodes a Cry1A protein or a Vip3A protein. In still other embodiments, the insecticidal protein-coding sequence encodes a Cry1Ab protein or a Vip3Aa protein. In still other embodiments, the insecticidal protein-coding sequence encodes a Cry1Ab protein comprising an amino acid sequence selected from the group consisting of SEQ ID NO: 61-66. In other embodiments, the insecticidal protein-coding sequence encodes a Vip3Aa protein comprising an amino acid sequence selected from the group consisting of SEQ ID NO: 115-117. In still other embodiments, the DNA construct comprises an expression cassette comprising a sequence selected from the group consisting of SEQ ID NO: 20-28 or SEQ ID NO: 85-93.

[0230] In some embodiments, the invention provides a method of producing a Vip3-expressing corn plant having increased male fertility, comprising introducing into the genome of a corn plant part a recombinant DNA construct comprising a Vip3 protein-coding sequence operably linked to a DNA sequence encoding a microRNA (miRNA) element that is male tissue-specific or male tissue-preferred in a corn plant, such tapetum-specific or tapetum-preferred, wherein the miRNA element is heterologous with respect to the Vip3 protein-coding sequence; producing a corn plant from the corn plant part, wherein the miRNA element reduces the expression of the Vip3 protein in the male reproductive tissue, e.g. tapetum, thereby producing a Vip3-expressing corn plant having increased male fertility compared to a Vip3-expressing corn plant without the DNA construct.

[0231] In some embodiments, the invention provides a method of producing a Vip3-expressing corn plant having increased male fertility, comprising: (a) crossing a first Vip3-expressing corn plant with a second corn plant, wherein the first corn plant comprises within its genome a recombinant DNA construct comprising a Vip3 protein-coding sequence operably linked to a DNA sequence encoding a microRNA (miRNA) element that is male tissue-specific or male tissue-preferred in a corn plant, wherein the miRNA element is heterologous with respect to the Vip3 protein-coding sequence; and optionally (b) backcrossing a resulting Vip3-epressing progeny corn plant of step (a) comprising the DNA construct with a parent plant to produce backcross progeny plants; (c) selecting for backcross a Vip3-expressing progeny plant that comprises the DNA construct; and (d) performing steps b) and c) at least three times to fix the DNA construct in a desired genetic background, thereby producing a Vip3-expressing corn plant comprising the DNA construct and having increased male fertility compared to a Vip3-expressing maize plant without the DNA construct.

[0232] In some embodiments, the invention provides a method of improving seed production from a Vip3-expressing corn plant, comprising: (a) crossing a first corn plant or corn germplasm with a second corn plant or corn germplasm, wherein the first or second corn plant or corn germplasm expresses a Vip3 insecticidal protein, and wherein the first corn plant or corn germplasm comprises within its genome a recombinant DNA construct comprising a Vip3 protein-coding sequence operably linked to a DNA sequence encoding a microRNA (miRNA) element that is male tissue-specific or male tissue-preferred in a corn plant, wherein the miRNA element is heterologous with respect to the Vip3 protein-coding sequence, and wherein the miRNA element reduces the expression level of the Vip3 protein in the male reproductive tissue; and (b) using a progeny maize plant comprising the DNA construct as a pollinator in a cross with itself or a second corn plant or corn germplasm that functions as a seed parent, thereby improving seed production from the cross as compared with a suitable control cross.

[0233] In some embodiments of the above described methods for producing a Vip3-expressing corn plant and improving seed production of a Vip3-expressing corn plant, the miRNA element is comprised within a 5′ untranslated region of said insecticidal protein-coding sequence, or within a 3′ untranslated region of the insecticidal protein-coding sequence or within the insecticidal protein-coding sequence between the start and stop codons. In other embodiments, the male tissue is pollen and/or tapetum. In other embodiments, the miRNA element comprises a nucleotide sequence that encodes at least one miRNA initiator sequence. In still other embodiments the miRNA initiator sequence encoded by the nucleotide sequence is selected from the group consisting of SEQ ID NO: 94-97. In still other embodiments of the methods, the expression of the miRNA initiator sequence in a transgenic corn plant reduces the expression of the Vip3 protein in male reproductive tissue of the transgenic corn plant compared to a non-male reproductive tissue in the transgenic corn plant. In further embodiments, the miRNA element comprises a sequence selected from the group consisting of SEQ ID NO: 74-78.

[0234] In some embodiments of the above described methods of the invention, the expression of the Vip3 protein-coding sequence in a transgenic corn plant confers insect pest tolerance to the corn plant. In other embodiments, the insect pest is a fall armyworm or a corn earworm. In other embodiments, the Vip3 protein is a Vip3A protein. In still other embodiments, the Vip3A protein is a Vip3Aa protein. In still other embodiments, the Vip3Aa protein comprises an amino acid sequence selected from the group consisting of SEQ ID NO: 115-117. In still other embodiments of the methods, the DNA construct comprises an expression cassette, wherein the expression cassette comprises a sequence selected from the group consisting of SEQ ID NO: 85-93.

[0235] In some embodiments, the invention provides a recombinant insecticidal protein that is active against a lepidopteran insect, wherein the insecticidal protein comprises an amino acid sequence that is encoded by a male tissue-specific or male tissue-preferred miRNA element, and wherein the miRNA element encodes at least one miRNA initiator sequence. In other embodiments, the insecticidal protein is a Cry1 protein or a Vip3 protein. In other embodiments, the Cry1 protein is a Cry1A protein or the Vip3 protein is a Vip3A protein. In still other embodiments, the Cry1A protein is a Cry1Ab protein and the Vip3A protein is a Vip3Aa protein. In still other embodiments, the amino acid sequence is selected from the group consisting of SEQ ID NO: 61-66 or SEQ ID NO: 115-117. In other embodiments, the recombinant insecticidal protein is active against a lepidopteran pest that is a European corn borer, a fall armyworm or a corn earworm. In other embodiments, the male tissue is pollen or tapetum. In other embodiments, the miRNA element comprises a target insertion sequence. In still other embodiments, the miRNA element comprises a target insertion sequence selected from the group consisting of SEQ ID NO: 10-18 or SEQ ID NO: 74-78. In still other embodiments, the miRNA initiator sequence is selected from the group consisting of SEQ ID NO: 29-34 or SEQ ID NO: 94-97.

[0236] In some embodiments, the invention provides a synthetic polynucleotide encoding a recombinant insecticidal protein of the invention. In other embodiments, the synthetic polynucleotide comprises a sequence selected from the group consisting of SEQ ID NO: 68-73 or SEQ ID NO: 118-121.

[0237] In some embodiments, a DNA construct of the invention is expressed in transgenic plants, thus causing the biosynthesis of the corresponding recombinant insecticidal protein in the transgenic plants. In this way, transgenic plants with enhanced resistance to insects, for example lepidopteran insect pests, are generated. For their expression in transgenic plants, the DNA constructs of the invention may optionally be modified and optimized. Although in many cases genes from microbial organisms can be expressed in plants at high levels without modification, low expression in transgenic plants may result from microbial nucleic acids having codons that are not preferred in plants. It is known in the art that all organisms have specific preferences for codon usage, and the codons of the nucleic acids described in this invention can be changed to conform with plant preferences, while maintaining the amino acids encoded thereby. Furthermore, high expression in plants is best achieved from coding sequences that have at least about 35% GC content, preferably more than about 45%, more preferably more than about 50%, and most preferably more than about 60%. Microbial nucleic acids that have low GC contents may express poorly in plants due to the existence of ATTTA motifs that may destabilize messages, and AATAAA motifs that may cause inappropriate polyadenylation. In some embodiments, sequences can be modified to account for the specific codon preferences and GC content preferences of monocotyledons or dicotyledons as these preferences have been shown to differ (Murray et al. Nucl. Acids Res. 17:477-498 (1989)). In addition, the nucleic acids are screened for the existence of illegitimate splice sites that may cause message truncation. All changes required to be made within the nucleic acids such as those described above can be made using well known techniques of site directed mutagenesis, PCR, and synthetic gene construction, for example, using the methods described in the published patent applications EP 0 385 962, EP 0 359 472, and WO 93/07278.

[0238] In some embodiments of the invention, a coding sequence for an insecticidal protein of the invention is made according to the procedure disclosed in U.S. Pat. No. 5,625,136, herein incorporated by reference. In this procedure, maize preferred codons, i.e., the single codon that most frequently encodes that amino acid in maize, are used. The maize preferred codon for a particular amino acid might be derived, for example, from known gene sequences from maize. Maize codon usage for 28 genes from maize plants is found in Murray et al., Nucleic Acids Research 17:477-498 (1989), the disclosure of which is incorporated herein by reference.

[0239] In this manner, the nucleotide sequences can be optimized for expression in any plant. It is recognized that all or any part of the gene sequence may be optimized or synthetic. That is, synthetic or partially optimized sequences may also be used.

[0240] For more efficient initiation of translation, sequences adjacent to the initiating methionine may be modified. For example, they can be modified by the inclusion of sequences known to be effective in plants. Joshi has suggested an appropriate consensus for plants (NAR 15:6643-6653 (1987)) and Clonetech suggests a further consensus translation initiator (1993/1994 catalog, page 210). These consensus sequences are suitable for use with the nucleic acids of this invention. In embodiments, the sequences are incorporated into constructions comprising the nucleic acids, up to and including the ATG (whilst leaving the second amino acid unmodified), or alternatively up to and including the GTC subsequent to the ATG (with the possibility of modifying the second amino acid of the transgene).

[0241] Expression of nucleic acid molecules of the invention in transgenic plants is driven by promoters that function in plants. The choice of promoter will vary depending on the temporal and spatial requirements for expression, and also depending on the target species. Thus, expression of the nucleic acids of this invention in leaves, in stalks or stems, in ears, in inflorescences (e.g. spikes, panicles, cobs, etc.), in roots, and/or seedlings is preferred. In many cases, however, protection against more than one type of insect pest is sought, and thus expression in multiple tissues is desirable. Although many promoters from dicotyledons have been shown to be operational in monocotyledons and vice versa, ideally dicotyledonous promoters are selected for expression in dicotyledons, and monocotyledonous promoters for expression in monocotyledons. However, there is no restriction to the provenance of selected promoters; it is sufficient that they are operational in driving the expression of the nucleic acids in the desired cell.

[0242] In some embodiments, promoters are used that are expressed constitutively including the actin or ubiquitin or cmp promoters or the CaMV 35S and 19S promoters. The nucleic acids of this invention can also be expressed under the regulation of promoters that are chemically regulated. Preferred technology for chemical induction of gene expression is detailed in the published application EP 0 332 104 (to Ciba-Geigy) and U.S. Pat. No. 5,614,395. A preferred promoter for chemical induction is the tobacco PR-1a promoter.

[0243] In other embodiments, a category of promoters which is wound inducible can be used. Numerous promoters have been described which are expressed at wound sites and also at the sites of phytopathogen infection. Ideally, such a promoter should only be active locally at the sites of infection, and in this way the chimeric insecticidal proteins of the invention only accumulate in cells that need to synthesize the proteins to kill the invading insect pest. Preferred promoters of this kind include those described by Stanford et al. Mol. Gen. Genet. 215:200-208 (1989), Xu et al. Plant Molec. Biol. 22:573-588 (1993), Logemann et al. Plant Cell 1:151-158 (1989), Rohrmeier & Lehle, Plant Molec. Biol. 22:783-792 (1993), Firek et al. Plant Molec. Biol. 22:129-142 (1993), and Warner et al. Plant J. 3:191-201 (1993).

[0244] Tissue-specific or tissue-preferential promoters useful for the expression of genes encoding chimeric insecticidal proteins of the invention in plants, particularly corn, are those which direct expression in root, pith, leaf or pollen, particularly root. Such promoters, e.g. those isolated from PEPC or trpA, are disclosed in U.S. Pat. No. 5,625,136, or MTL, disclosed in U.S. Pat. No. 5,466,785. Both U. S. patents are herein incorporated by reference in their entirety. In some embodiments, the combination of a male tissue-specific or male tissue-preferred promoter in combination with a DNA construct of the invention, i.e. a DNA construct comprising an insecticidal protein-coding sequence operably linked to a DNA sequence encoding a microRNA (miRNA) element that is male tissue-specific or male tissue-preferred in a corn plant, wherein said miRNA element is heterologous with respect to said insecticidal protein-coding sequence, leads to a larger decrease in expression of the insecticidal protein in pollen or tapetum than a decrease attributable to the tissue-specific/tissue-preferred promoter or miRNA element alone.

[0245] In addition, promoters functional in plastids can be used. Non-limiting examples of such promoters include the bacteriophage T3 gene 9 5′ UTR and other promoters disclosed in U.S. Pat. No. 7,579,516. Other promoters useful with the invention include but are not limited to the S-E9 small subunit RuBP carboxylase promoter and the Kunitz trypsin inhibitor gene promoter (Kti3).

[0246] In some embodiments of the invention, inducible promoters can be used. Thus, for example, chemical-regulated promoters can be used to modulate the expression of nucleotide sequences of the invention in a plant through the application of an exogenous chemical regulator. Regulation of the expression of nucleotide sequences of the invention via promoters that are chemically regulated enables the polypeptides of the invention to be synthesized only when the crop plants are treated with the inducing chemicals. Depending upon the objective, the promoter may be a chemical-inducible promoter, where application of a chemical induces expression of a nucleotide sequence of the invention, or a chemical-repressible promoter, where application of the chemical represses expression of a nucleotide sequence of the invention.

[0247] Chemical inducible promoters are known in the art and include, but are not limited to, the maize In2-2 promoter, which is activated by benzenesulfonamide herbicide safeners, the maize GST promoter, which is activated by hydrophobic electrophilic compounds that are used as pre-emergent herbicides, and the tobacco PR-1 a promoter, which is activated by salicylic acid (e.g., the PR1a system), steroid steroid-responsive promoters (see, e.g., the glucocorticoid-inducible promoter in Schena et al. (1991) Proc. Natl. Acad. Sci. USA 88, 10421-10425 and McNellis et al. (1998) Plant J. 14, 247-257) and tetracycline-inducible and tetracycline-repressible promoters (see, e.g., Gatz et al. (1991) Mol. Gen. Genet. 227, 229-237, and U.S. Pat. Nos. 5,814,618 and 5,789,156, Lac repressor system promoters, copper-inducible system promoters, salicylate-inducible system promoters (e.g., the PR1a system), glucocorticoid-inducible promoters (Aoyama et al. (1997) Plant J. 11:605-612), and ecdysone-inducible system promoters.

[0248] Other non-limiting examples of inducible promoters include ABA- and turgor-inducible promoters, the auxin-binding protein gene promoter (Schwob et al. (1993) Plant J. 4:423-432), the UDP glucose flavonoid glycosyl-transferase promoter (Ralston et al. (1988) Genetics 119:185-197), the MPI proteinase inhibitor promoter (Cordero et al. (1994) Plant J. 6:141-150), and the glyceraldehyde-3-phosphate dehydrogenase promoter (Kohler et al. (1995) Plant Mol. Biol. 29:1293-1298; Martinez et al. (1989) J. Mol. Biol. 208:551-565; and Quigley et al. (1989) J. Mol. Evol. 29:412-421). Also included are the benzene sulphonamide-inducible (U.S. Pat. No. 5,364,780) and alcohol-inducible (Int'l Patent Application Publication Nos. WO 97/06269 and WO 97/06268) systems and glutathione S-transferase promoters. Likewise, one can use any of the inducible promoters described in Gatz (1996) Current Opinion Biotechnol. 7:168-172 and Gatz (1997) Annu. Rev. Plant Physiol. Plant Mol. Biol. 48:89-108. Other chemically inducible promoters useful for directing the expression of the nucleotide sequences of this invention in plants are disclosed in U.S. Pat. No. 5,614,395 herein incorporated by reference in its entirety. Chemical induction of gene expression is also detailed in the published application EP 0 332 104 (to Ciba-Geigy) and U.S. Pat. No. 5,614,395. In some embodiments, a promoter for chemical induction can be the tobacco PR-1a promoter.

[0249] In further aspects, nucleotide sequences of the invention can be operably associated with a promoter that is wound inducible or inducible by pest or pathogen infection (e.g., a insect or nematode plant pest). Numerous promoters have been described which are expressed at wound sites and/or at the sites of pest attack (e.g., insect/nematode feeding) or phytopathogen infection. Ideally, such a promoter should be active only locally at or adjacent to the sites of attack, and in this way expression of the nucleotide sequences of the invention will be focused in the cells that are being invaded or fed upon. Such promoters include, but are not limited to, those described by Stanford et al., Mol. Gen. Genet. 215:200-208 (1989), Xu et al. Plant Molec. Biol. 22:573-588 (1993), Logemann et al. Plant Cell 1:151-158 (1989), Rohrmeier and Lehle, Plant Molec. Biol. 22:783-792 (1993), Firek et al. Plant Molec. Biol. 22:129-142 (1993), Warner et al. Plant J. 3:191-201 (1993), U.S. Pat. Nos. 5,750,386, 5,955,646, 6,262,344, 6,395,963, 6,703,541, 7,078,589, 7,196,247, 7,223,901, and U.S. Patent Application Publication 2010043102.

[0250] In some embodiments of the invention, a “minimal promoter” or “basal promoter” is used. A minimal promoter is capable of recruiting and binding RNA polymerase II complex and its accessory proteins to permit transcriptional initiation and elongation. In some embodiments, a minimal promoter is constructed to comprise only the nucleotides/nucleotide sequences from a selected promoter that are required for binding of the transcription factors and transcription of a nucleotide sequence of interest that is operably associated with the minimal promoter including but not limited to TATA box sequences. In other embodiments, the minimal promoter lacks cis sequences that recruit and bind transcription factors that modulate (e.g., enhance, repress, confer tissue specificity, confer inducibility or repressibility) transcription. A minimal promoter is generally placed upstream (i.e., 5′) of a nucleotide sequence to be expressed. Thus, nucleotides/nucleotide sequences from any promoter useable with the present invention can be selected for use as a minimal promoter.

[0251] Numerous other sequences can be incorporated into expression cassettes described in this invention. These include sequences that have been shown to enhance expression such as intron sequences (e.g. from Adhl and bronzel) and viral leader sequences (e.g. from TMV, MCMV and AMV).

[0252] It may be preferable to target expression of the nucleic acids of the present invention to different cellular localizations in the plant. In some cases, localization in the cytosol may be desirable, whereas in other cases, localization in some subcellular organelle may be preferred. Subcellular localization of transgene-encoded enzymes is undertaken using techniques well known in the art. Typically, the DNA encoding the target peptide from a known organelle-targeted gene product is manipulated and fused upstream of the nucleic acid. Many such target sequences are known for the chloroplast and their functioning in heterologous constructions has been shown. The expression of the nucleic acids of the present invention is also targeted to the endoplasmic reticulum or to the vacuoles of the host cells. Techniques to achieve this are well known in the art.

[0253] Vectors suitable for plant transformation are described elsewhere in this specification. For Agrobacterium-mediated transformation, binary vectors or vectors carrying at least one T-DNA border sequence are suitable, whereas for direct gene transfer any vector is suitable and linear DNA containing only the construction of interest may be preferred. In the case of direct gene transfer, transformation with a single DNA species or co-transformation can be used (Schocher et al. Biotechnology 4:1093-1096 (1986)). For both direct gene transfer and Agrobacterium-mediated transfer, transformation is usually (but not necessarily) undertaken with a selectable marker that may provide resistance to an antibiotic (kanamycin, hygromycin or methotrexate) or a herbicide (basta). Plant transformation vectors comprising the nucleic acid molecules of the present invention may also comprise genes (e.g. phosphomannose isomerase; PMI) which provide for positive selection of the transgenic plants as disclosed in U.S. Pat. Nos. 5,767,378 and 5,994,629, herein incorporated by reference. The choice of selectable marker is not, however, critical to the invention.

[0254] In some embodiments, the nucleic acid can be transformed into the nuclear genome. In other embodiments, a nucleic acid of the present invention is directly transformed into the plastid genome. A major advantage of plastid transformation is that plastids are generally capable of expressing bacterial genes without substantial codon optimization, and plastids are capable of expressing multiple open reading frames under control of a single promoter. Plastid transformation technology is extensively described in U.S. Pat. Nos. 5,451,513, 5,545,817, and 5,545,818, in PCT application no. WO 95/16783, and in McBride et al. (1994) Proc. Nati. Acad. Sci. USA 91, 7301-7305. The basic technique for chloroplast transformation involves introducing regions of cloned plastid DNA flanking a selectable marker together with the gene of interest into a suitable target tissue, e.g., using biolistics or protoplast transformation (e.g., calcium chloride or PEG mediated transformation). The 1 to 1.5 kb flanking regions, termed targeting sequences, facilitate homologous recombination with the plastid genome and thus allow the replacement or modification of specific regions of the plastome. Initially, point mutations in the chloroplast 16S rRNA and rps12 genes conferring resistance to spectinomycin and/or streptomycin are utilized as selectable markers for transformation (Svab, Z., Hajdukiewicz, P., and Maliga, P. (1990) Proc. Nati. Acad. Sci. USA 87, 8526-8530; Staub, J. M., and Maliga, P. (1992) Plant Cell 4, 39-45). This resulted in stable homoplasmic transformants at a frequency of approximately one per 100 bombardments of target leaves. The presence of cloning sites between these markers allowed creation of a plastid targeting vector for introduction of foreign genes (Staub, J. M., and Maliga, P. (1993) EMBO J. 12, 601-606). Substantial increases in transformation frequency are obtained by replacement of the recessive rRNA or r-protein antibiotic resistance genes with a dominant selectable marker, the bacterial aadA gene encoding the spectinomycin-cletoxifying enzyme aminoglycoside-3′-adenyltransferase (Svab, Z., and Maliga, P. (1993) Proc. Natl. Acad. Sci. USA 90, 913-917). Previously, this marker had been used successfully for high-frequency transformation of the plastid genome of the green alga Chlamydomonas reinhardtii (Goldschmidt-Clermont, M. (1991) Nucl. Acids Res. 19:4083-4089). Other selectable markers useful for plastid transformation are known in the art and encompassed within the scope of the invention. Typically, approximately 15-20 cell division cycles following transformation are required to reach a homoplastidic state. Plastid expression, in which genes are inserted by homologous recombination into all of the several thousand copies of the circular plastid genome present in each plant cell, takes advantage of the enormous copy number advantage over nuclear-expressed genes to permit expression levels that can readily exceed 10% of the total soluble plant protein. In a preferred embodiment, a nucleic acid of the present invention is inserted into a plastid-targeting vector and transformed into the plastid genome of a desired plant host. Plants homoplastic for plastid genomes containing a nucleic acid of the present invention are obtained, and are preferentially capable of high expression of the nucleic acid.

[0255] In some embodiments, a transgenic plant of the invention may comprise at least a second pesticidal agent which is non-proteinaceous. In some aspects of these embodiments, the second pesticidal agent is an interfering RNA molecule. An interfering RNA typically comprises at least a RNA fragment against a target gene, a spacer sequence, and a second RNA fragment which is complementary to the first, so that a double-stranded RNA structure can be formed. RNA interference (RNAi) occurs when an organism recognizes double-stranded RNA (dsRNA) molecules and hydrolyzes them. The resulting hydrolysis products are small RNA fragments of about 19-24 nucleotides in length, called small interfering RNAs (siRNAs). The siRNAs then diffuse or are carried throughout the organism, including across cellular membranes, where they hybridize to mRNAs (or other RNAs) and cause hydrolysis of the RNA. Interfering RNAs are recognized by the RNA interference silencing complex (RISC) into which an effector strand (or “guide strand”) of the RNA is loaded. This guide strand acts as a template for the recognition and destruction of the duplex sequences. This process is repeated each time the siRNA hybridizes to its complementary-RNA target, effectively preventing those mRNAs from being translated, and thus “silencing” the expression of specific genes from which the mRNAs were transcribed. Interfering RNAs are known in the art to be useful for insect control (see, for example, publication WO2013/192256, incorporated by reference herein). An interfering RNA designed for use in insect control produces a non-naturally occurring double-stranded RNA, which takes advantage of the native RNAi pathways in the insect to trigger down-regulation of target genes that may lead to the cessation of feeding and/or growth and may result in the death of the insect pest. The interfering RNA molecule may confer insect resistance against the same target pest as the protein of the invention, or may target a different pest. The targeted insect plant pest may feed by chewing, sucking, or piercing. Interfering RNAs are known in the art to be useful for insect control. In other embodiments, the interfering RNA may confer resistance against a non-insect plant pest, such as a nematode pest or a virus pest.

[0256] The co-expression of more than one pesticidal agent in the same transgenic plant can be achieved by making a single recombinant vector comprising coding sequences of more than one pesticidal agent in a so called molecular stack and genetically engineering a plant to contain and express all the pesticidal agents in the transgenic plant. Such molecular stacks may be also be made by using mini-chromosomes as described, for example in U.S. Pat. No. 7,235,716. Alternatively, a transgenic plant comprising one nucleic acid encoding a first pesticidal agent can be re-transformed with a different nucleic acid encoding a second pesticidal agent and so forth. Alternatively, a plant, Parent 1, can be genetically engineered for the expression of genes of the present invention. A second plant, Parent 2, can be genetically engineered for the expression of a second pesticidal agent. By crossing Parent 1 with Parent 2, progeny plants are obtained which express all the genes introduced into Parents 1 and 2.

[0257] Transgenic plants or seed comprising a recombinant insecticidal protein of the invention can also be treated with an insecticide or insecticidal seed coating as described in U.S. Pat. Nos. 5,849,320 and 5,876,739, herein incorporated by reference. Where both the insecticide or insecticidal seed coating and the transgenic plant or seed of the invention are active against the same target insect, for example a lepidopteran target pest, the combination is useful (i) in a method for further enhancing activity of the composition of the invention against the target insect, and (ii) in a method for preventing development of resistance to the composition of the invention by providing yet another mechanism of action against the target insect. Thus, the invention provides a method of enhancing control of a lepidopteran insect population comprising providing a transgenic plant or seed of the invention and applying to the plant or the seed an insecticide or insecticidal seed coating to a transgenic plant or seed of the invention.

[0258] Even where the insecticidal seed coating is active against a different insect, the insecticidal seed coating is useful to expand the range of insect control, for example by adding an insecticidal seed coating that has activity against coleopteeran insects to a transgenic seed of the invention, which, in some embodiments, has activity against coleopteran and some lepidopteran insects, the coated transgenic seed produced controls both lepidopteran and coleopteran insect pests.

[0259] Examples of such insecticides and/or insecticidal seed coatings include, without limitation, a carbamate, a pyrethroid, an organophosphate, a friprole, a neonicotinoid, an organochloride, a nereistoxin, or a combination thereof. In another embodiment, the insecticide or insecticidal seed coating are selected from the group consisting of carbofuran, carbaryl, methomyl, bifenthrin, tefluthrin, permethrin, cyfluthrin, lambda-cyhalothrin, cypermethrin, deltamethrin, chlorpyrifos, chlorethoxyfos, dimethoate, ethoprophos, malathion, methyl-parathion, phorate, terbufos, tebupirimiphos, fipronil, acetamiprid, imidacloprid, thiacloprid, thiamethoxam, endosulfan, bensultap, and a combination thereof. Commercial products containing such insecticides and insecticidal seed coatings include, without limitation, Furadan® (carbofuran), Lanate® (methomyl, metomil, mesomile), Sevin® (carbaryl), Talstar® (bifenthrin), Force® (tefluthrin), Ammo® (cypermethrin), Cymbush® (cypermethrin), Delta Gold® (deltamethrin), Karate® (lambda-cyhalothrin), Ambush® (permethrin), Pounce® (permethrin), Brigade® (bifenthrin), Capture® (bifenthrin), ProShield® (tefluthrin), Warrior® (lambda-cyhalothrin), Dursban® (chlorphyrifos), Fortress® (chlorethoxyfos), Mocap® (ethoprop), Thimet® (phorate), AAstar® (phorate, flucythinate), Rampart® (phorate), Counter® (terbufos), Cygon® (dimethoate), Dicapthon, Regent® (fipronil), Cruiser® (thiamethoxam), Gaucho® (imidacloprid), Prescribe® (imidacloprid), Poncho® (clothianidin) and Aztec® (cyfluthrin, tebupirimphos).

[0260] The invention also encompasses an insecticidal composition comprising an effective insect-controlling amount of a recombinant insecticidal protein of the invention. In further embodiments, the insecticidal composition comprises a suitable agricultural carrier and an insecticidal protein of the invention. An insecticidal composition of the invention, for example a composition comprising an insecticidal protein of the invention and an agriculturally acceptable carrier, may be used in conventional agricultural methods. An agriculturally acceptable carrier is a formulation useful for applying a composition comprising a polypeptide of the invention to a plant or seed. For example, the compositions of the invention may be mixed with water and/or fertilizers and may be applied preemergence and/or postemergence to a desired locus by any means, such as airplane spray tanks, irrigation equipment, direct injection spray equipment, knapsack spray tanks, cattle dipping vats, farm equipment used in ground spraying (e.g., boom sprayers, hand sprayers), and the like. The desired locus may be soil, plants, and the like. An insecticidal composition of the invention may be applied to a seed or plant propagule in any physiological state, at any time between harvest of the seed and sowing of the seed; during or after sowing; and/or after sprouting. It is preferred that the seed or plant propagule be in a sufficiently durable state that it incurs no or minimal damage, including physical damage or biological damage, during the treatment process. A formulation may be applied to the seeds or plant propagules using conventional coating techniques and machines, such as fluidized bed techniques, the roller mill method, rotostatic seed treaters, and drum coaters.

[0261] In some embodiments, the invention encompasses a method of controlling an insect pest comprising, delivering to the insect pest or an environment thereof an effective amount of a recombinant insecticidal protein of the invention. In some aspects of these embodiments, the insecticidal protein is delivered through a transgenic plant or by topical application of an insecticidal composition comprising the chimeric insecticidal protein. In other embodiments, the recombinant insecticidal protein comprises an amino acid sequence selected from the group consisting of SEQ ID NO: 61-66 or SEQ ID NO: 115-117. In other embodiments, the insecticidal composition comprises an insecticidal Cry1Ab protein comprising SEQ ID NO: 60. In other embodiments, the transgenic plant or the insecticidal composition comprises a second insecticidal agent different from the chimeric insecticidal protein. In other embodiments, the second insecticidal agent is a protein or a dsRNA. In further embodiments, the protein is selected from the group consisting of a Cry protein, a vegetative insecticidal protein (Vip), a patatin, a protease, a protease inhibitor, a urease, an alpha-amylase inhibitor, a pore-forming protein, a lectin, an engineered antibody or antibody fragment, or a chitinase, and a combination thereof.

[0262] In some embodiments, the invention also provides a method of mitigating the impact of a transgenic corn plant expressing an insecticidal protein of the invention on non-target insects exposed to pollen from the transgenic corn plant, comprising introducing into a corn plant a DNA construct of the invention, wherein the DNA construct causes the insecticidal protein to be expressed at a lower level in pollen compared to leaf, thus mitigating the impact of the transgenic corn pollen on non-target insects exposed to the pollen.

### EXAMPLES

[0263] Embodiments of this invention can be better understood by reference to the following examples. The foregoing and following description of embodiments of the invention and the various embodiments are not intended to limit the claims, but are rather illustrative thereof. Therefore, it will be understood that the claims are not limited to the specific details of these examples. It will be appreciated by those skilled in the art that other embodiments of the invention may be practiced without departing from the spirit and the scope of the disclosure, the scope of which is defined by the appended claims. Art recognized recombinant DNA and molecular cloning techniques may be found in, for example, J. Sambrook, et al., Molecular Cloning: A Laboratory Manual, 3d Ed., Cold Spring Harbor, N.Y.: Cold Spring Harbor Laboratory Press (2001); by T. J. Silhavy, M. L. Berman, and L. W. Enquist, Experiments with Gene Fusions, Cold Spring Harbor Laboratory, Cold Spring Harbor, N.Y. (1984) and by Ausubel, F. M. et al., Current Protocols in Molecular Biology, New York, John Wiley and Sons Inc., (1988), Reiter, et al., Methods in Arabidopsis Research, World Scientific Press (1992), and Schultz et al., Plant Molecular Biology Manual, Kluwer Academic Publishers (1998).

### Example 1. Identification of Endogenous Male Tissue miRNAs

[0264] Pollen-specific and tapetum-specific miRNAs were mined from the public database, “PmiRExAT” on the World Wide Web at pmirexat.nabi.res.in/index.html (Gurjar, A. K. S., et al. PmiRExAt: Plants miRNA expression atlas database and web applications. 2016. Vol. 2016: article ID baw060; doi:10.1093/database/baw060). Pollen-specific miRNAs were identified by mining the data in “File 3: 283 NR known miR of Maize versus 43 datasets Count Matrix Foldchange and Shannon Entropy,” available for download from PmiRExAT. This file contains expression data, at arm granularity, i.e. 3′-arm (3p) or 5′-arm (5p), for corn miRNAs in various tissues from publically available studies. For the invention, “pollen-specific” or “tapetum-specific” miRNAs were defined as miRNAs with 1) the highest expression in pollen or tapetum relative to other tissues and 2) low expression in non-pollen or non-tapetum tissues. Based on these criteria, three pollen-specific miRNAs were chosen for further evaluation, miRNA159h-3p, miRNA156i-3p and miRNA171i-5p. One additional pollen-preferred miRNA, miR396b-3p, was also chosen from the same dataset because it has high expression in pollen (higher than miR171i-5p and miR156i-3p), but also mid-level expression in target tissues that are fed upon by pest insects, e.g. seedling, root and silks. Three tapetum-specific miRNAs were also chosen, miR2275a-3p, miR2275b-5p and miR2275b-3p.

### Example 2. Identification of Optimal Flanking Sequences for miRNA Binding Sites

[0265] To improve miRNA accessibility to binding to an initiator sequence, flanking sequences were designed and added at the 5′ and 3′ end of each initiator sequence. The flanking sequences were designed to conform to the following: 1) to give negative free energy around the initiator sequence; 2) a size of 17 bases on the 5′ end of the initiator sequence and 13 bases on the 3′ end of the initiator sequence; and 3) low GC content. Therefore, each miRNA element of the invention comprises an initiator sequence flanked on the 5′end by 17 bases and on the 3′ end by 13 bases. The size of the miRNA element is about 51 or 52 nucleotides.

[0266] The RNAinverse tool in the ViennaRNA software package (Lorenz et al. 2011. ViennaRNA Package 2.0 Algorithms for Molecular Biology, 6:26, doi:10.1186/1748-7188-6-26) was used to identify the most optimal 17 bp 5′ and 13 bp 3′ flanking sequence for each of the DNA constructs described below. For constructs where the putative target gene sequence was used, the 17 bp 5′ and 13 bp 3′ sequences around the target binding site were provided along with the 21/22 nucleotide initiator sequence as input to RNAinverse. RNAinverse was instructed to leave the miRNA initiator sequence unchanged but to modify the endogenous flanking sequences to generate the sequence with the lowest free energy. For example, an input sequence that was 5′-tcctattcaatgataagAAGAGCACCGTTCACTCCAACtgcaaacatgtgg-3′ (SEQ ID NO: 122), was changed to an output sequence that was 5′-tcctattcaaggataagAAGAGCACCGTTCACTCCAACtgcaaacaggtgg-3′ (SEQ ID NO: 123), where the “t” at positions 11 from the 5′ end and the “t” at position 5 from the 3′ end in the input sequence were changed to “g” in the output sequence (shown as underline). For constructs where the perfect matching sequence to the miRNA was used, the most optimal flanking sequences were generated de novo. For example, an input sequence that was 5′-nnnnnnnnnnnnnnnnnCAGAGCTCCCTTCACTCCAAAnnnnnnnnnnnnn-3′ (SEQ ID N: 124), where “n” is any base, was changed to an output sequence that was 5′-cgctcacgacagcctggCAGAGCTCCCTTCACTCCAAAcattgcgcatctc-3′ (SEQ ID NO: 125).

### Example 3. Design of Constructs with miRNA Binding Sites Inserted into Insect Control Genes

[0267] Multiple constructs were made that varied, 1) the mature miRNA target or initiator sequence that was inserted into the transgene, and 2) the location of the initiator sequence in the transgene, i.e. the initiator sequence was inserted in the 5′ untranslated region (5′UTR), the 3′ untranslated region (3′UTR) or within the insecticidal protein's coding sequence (CDS).

[0268] The initiator sequences used in this example were either a perfect complementary match to the 21 or 22 nucleotide sequence of the mature miRNA (“motif”) or the initiator sequence was the same as a predicted target gene within corn plants (“tgene”), i.e. may include mismatches to the mature miRNA sequence. It is known that initiator sequences with a few mismatches to the miRNA 3′ regions, which are common in plants, are often equally effective and sometimes more effective than perfectly matched sites (Liu Q, et al. (2014). The Plant Cell. 26(2):741-53). Some corn miRNA endogenous target genes are known and have been published (Zhang L, et al. (2009) PLoS Genet. 5(11): e 1000716), but these studies do not always distinguish between the two possible mature miRNAs that can be produced from the precursor miRNA, i.e. the 3′ and 5′ arms (e.g. miR142-3p vs. miR142-5p). Therefore, the 21 or 22 nucleotide mature miRNA for each of the miRNAs described in Example 1 were obtained from miRBase and used to search for potential target genes in the MAIZE_B73_REF_5_GENOME using the software: scan_for_matches available on the World Wide Web at “blog.theseed.org/servers/2010/07/scan-for-matches.html, using the rules disclosed by Schwab et al. 2005. Developmental Cell 8:517-527. Briefly, the rules are: 1) only one mismatch allowed between positions 2 to 12 inclusive; 2) no mismatches allowed at positions 10 and 11; 3) no more than 2 consecutive mismatches allowed after position 12; and 4) no more than 3 total mismatches (excluding mismatch at position 1) across the length of the mature miRNA. A list of computationally predicted target genes was generated for each miRNA.

[0269] Additional basic analyses (e.g. pairwise sequence alignment) of the scan_for_matches output provided the location of the binding site for the miRNA in each predicted target gene (e.g. exon, UTR and so forth), the number of mismatches between the miRNA and the binding site sequence, and the location(s) of the mismatches relative to the miRNA sequence. Gene expression data from a gene atlas expression study of a proprietary maize line and protein expression data from a public study (PMID: 27540173) were also collected to identify putative target genes with the expected expression pattern for a true endogenous target gene (i.e. expression repressed in pollen compared to other tissues)

[0270] Lastly, the binding sequences in the predicted target genes were compared to the sequences of closely related but non-pollen-specific miRNAs or non-tapetum-specific miRNAs to avoid inserting sequences that could potentially be bound by non-pollen/non-tapetum specific miRNAs which may inadvertently down-regulate the engineered insect control transgene in maize tissues where expression is still required for control of pest insects, e.g. leaf tissue. An example of the data generated for one of the mature miRNA sequences, miR159h-3p, is shown in Table 1.

TABLE 1
Sample data set used for choosing male tissue-specific/tissue-preferred miRNAs.

| | | | | Gene | |
|---|---|---|---|---|---|
| | | No. | Mismatch | Expression | Other miRNAs |
| B73_V5 Gene ID | Target Site Location | Mismatches | Position | in Pollen | Targeting Gene |
| Zm00001d003864 | 5’UTR | 2 | 6, 15 | M | mir159a/b/j/k/f-3p |
| Zm00001d043131 | Exon | 3 | 1, 20, 21 | M/H | mir159a/b/j/k/f-3p |
| Zm00001d049606 | Exon/5’UTR | 4 | 1, 12, 15, 21 | L/M | None |
| Zm00001d010309 | 5’UTR/intron/ 3'UTR | 3 | 8, 14, 19 | H | mir159a/b/j/k/f-3p |
| Zm00001d046517 | Exon | 3 | 7, 20, 21 | L | mir159a/b/j/k/f-3p |
| Zm00001d046518 | Exon | 3 | 7, 20, 21 | L | mir159a/b/j/k/f-3p |
| Zm00001d046519 | Exon | 3 | 7, 20, 21 | L | mir159a/b/j/k/f-3p |
| Zm00001d029563 | 5’UTR/intron | 4 | 1, 8, 14, 16 | H | None |

[0271] Based on the type of data shown in Table 1 for all four pollen miRNAs described in Example 1, twelve (12) constructs were made using a cry1Ab coding sequence (SEQ ID NO: 67) as the insecticidal transgene. The 12 constructs are described in Table 2. Construct 24366 is the control construct comprising a full-length cry1Ab-17 coding sequence without any miRNA element. The expression of Cry1Ab is driven by a maize ubiquitin promoter and NOS terminator. 23466 also contains a PMI selectable marker expression cassette for corn transformation. In addition, ten (10) constructs were made using a vip3 coding sequence (SEQ ID NO: 118) as the insecticidal transgene and miR2275. miR2275 is expressed preferentially in the tapetum layer within the anther and pre-pollen meiocytes. The presence of miR2275 is intended to provide anther-specific down-regulation of Vip3A in transgenic maize plants. The 10 constructs are described in Table 3. Construct 23705 is the control construct comprising a full-length vip3A coding sequence without any miRNA element. The expression of Vip3 is driven by a maize ubiquitin promoter and 35S terminator. 23705 also contains a PMI selectable marker expression cassette for corn transformation

TABLE 2
CrylAb miRNA constructs.

| | | | | Initiator | |
|---|---|---|---|---|---|
| | Construct | | Initiator | Sequence | Location in |
| | SEQ | | Sequence | SEQ | crylAb |
| Construct | ID NO: | miRNA-arm | Type | ID NO: | gene |
| 24366 | 47 | control | na | na | na |
| 24372 | 57 | miR159h-3p | motif | 29 | CDS |
| 24373 | 48 | miR159h-3p | tgene | 30 | CDS |
| 24374 | 49 | miR156i-3p | motif | 31 | CDS |
| 24375 | 50 | miR171i-5p | motif | 32 | CDS |
| 24376 | 51 | miR396b-3p | motif | 33 | CDS |
| 24377 | 52 | miR396b-3p | tgene | 34 | CDS |
| 24378 | 58 | miR159h-3p | motif | 29 | 5’UTR |
| 24379 | 53 | miR159h-3p | tgene | 30 | 5’UTR |
| 24380 | 54 | miR156i-3p | motif | 31 | 5’UTR |
| 24381 | 55 | miR171i-5p | motif | 32 | 5’UTR |
| 24382 | 59 | miR396b-3p | motif | 33 | 5’UTR |
| 24383 | 56 | miR396b-3p | tgene | 34 | 5’UTR |

TABLE 3
Vip3 miRNA constructs.

| | | | | Initiator | |
|---|---|---|---|---|---|
| | Construct | | Initiator | Sequence | Location |
| | SEQ | | Sequence | SEQ : | in |
| Construct | ID NO: | miRNA-arm | Type | ID NO | Vip3 gene |
| 23705 | 104 | Control | na | na | na |
| 23708 | 105 | miR2275a-3p | motif | 94 | 3’UTR |
| 23711 | 106 | miR2275b-5p | motif | 95 | 3’UTR |
| 23712 | 107 | miR2275b-3p | motif | 96 | 3’UTR |
| 23713 | 108 | miR2275b-3p | motif | 96 | 5’UTR |
| 23714 | 109 | miR2275b-3p | motif | 96 | 3’UTR |
| 23715 | 110 | miR2275b-3p | tgene | 97 | 3’UTR |
| 23716 | 111 | miR2275b-3p | motif | 96 | CDS |
| 23717 | 112 | miR2275b-3p | motif | 96 | CDS |
| 23718 | 113 | miR2275b-3p | motif | 96 | CDS |

### Example 4. Transient Transformation

[0272] This example describes testing the constructs designed in Example 3 in transient maize assays to determine whether any maize endogenous miRNAs with similar binding sequences to the selected miRNAs of the invention but with different tissue location could target the engineered transgene in the constructs for down regulation in tissues other than male reproductive tissue, e.g. leaf. An example of such a maize transient assay is disclosed in U.S. Pat. No. 8,642,839, herein incorporated by reference. The skilled person will recognize that variations in and modifications to the transient assay system may be made to achieve the same intended result. Constructs described in Example 3 were tested in the maize leaf transient assay. For the Cry1Ab constructs, a construct comprising the full-length cry1Ab coding sequence (24366) without the miRNA element was used as a positive control. An empty vector (EHA101) was used as the negative control. A third control construct (18515) that comprises a coral fluorescent protein (CFP) was also tested in each assay. Expression levels of the Cry1Ab protein were normalized against the expression level of CFP. Results are shown in Table 4.

TABLE 4
Results of a transient maize assay for CrylAb-miRNA constructs.

| | | CrylAb | CrylAb |
|---|---|---|---|
| | | Conc ± 0SE | Conc ± 0SE |
| | | (ng CrylAb/ | (ng CrylAb/ |
| Construct | Expression Cassette | mg TSP) | μg CFP) |
| 24366 | Positive Control | 9.0 ± 01.5 | 240.28 ± 0118.6 |
| 24372 | miR159h-motif-CDS | 1.8 ± 00.2 | 40.91 ± 082.61 |
| 24373 | miR159h-gene-CDS | 8.0 ± 02.0 | 204.90 ± 078.93 |
| 24374 | miR156i-motif-CDS | 8.0 ± 01.2 | 190.02 ± 0100.66 |
| 24375 | miR171i-motif-CDS | 5.2 ± 00.9 | 141.70 ± 019.58 |
| 24376 | miR396b-motif-CDS | 7.9 ± 01.3 | 200.74 ± 083.30 |
| 24377 | miR396b-gene-CDS | 5.0 ± 01.5 | 103.25 ± 070.07 |
| 24378 | miR159h-motif-5’UTR | 4.2 ± 00.8 | 89.79 ± 090.31 |
| 24379 | miR159h-gene-5’UTR | 11 ± 02.6 | 257.79 ± 0104.33 |
| 24380 | miR156i-motif-5’UTR | 12.8 ± 03.2 | 323.10 ± 061.72 |
| 24381 | miR171i-motif-5’UTR | 11.2 ± 01.8 | 284.45 ± 070.02 |
| 24382 | miR396b-motif-5’UTR | 4.2 ± 00.8 | 114.88 ± 044.16 |
| 24383 | miR396b-gene-5’UTR | 6.9 ± 01.1 | 177.20 ± 053.40 |
| EHA101 | Negative Control | 0.0 ± 00.0 | 0.0 ± 00.0 |

[0273] Expression of Cry1Ab protein was detected for all of the Cry1Ab-miRNA constructs, although expression for three of the constructs was significantly less than the control. Based on the transient expression results the following constructs were chosen for testing in stable maize transformation experiments: 24373, 24374, 24375, 24376, 24377, 24379, 24380 and 24381, as well as the Cry1Ab control, 24366.

[0274] Expression of Vip3A protein was detected for all of the Vip3A-miRNA constructs, although expression for four of the constructs was significantly less than the control. All of the Vip3A-miR2275 constructs were tested in stable transformation experiments.

### Example 5. Stable Transformation of Maize

[0275] This example describes testing the constructs selected in Example 4 in stable maize transformation experiments.

[0276] Each recombinant vector described above comprises two expression cassettes. The first expression cassette comprises an insecticidal protein-coding sequence operably linked to a DNA sequence encoding a microRNA (miRNA) element that is male tissue-specific or male tissue-preferred in a corn plant. The first expression cassette further comprises a maize ubiquitin promoter and NOS terminator both of which are operably linked to the coding-sequence/miRNA element combination. The second cassette comprises a maize Ubi1 promoter operably linked to a pmi coding sequence that encodes the selectable marker phosphomannose isomerase (PMI), which is operably linked to a maize Ubi1 terminator.

[0277] A recombinant vector of the invention is transformed into Agrobacterium tumefaciens using standard molecular biology techniques. To prepare the Agrobacteria for transformation, cells are cultured in liquid YPC media at 28° C. and 220 rpm overnight.

[0278] Agrobacterium transformation of immature maize embryos is performed essentially as described in Negrotto et al., 2000, Plant Cell Reports 19: 798-803. For this example, all media constituents are essentially as described in Negrotto et al., supra. However, various media constituents known in the art may be substituted.

[0279] Briefly, Agrobacterium strain LBA4404 (pSB1) containing the binary vector plant transformation vector was grown on YEP (yeast extract (5 g/L), peptone (10 g/L), NaCl (5 g/L), 15 g/1 agar, pH 6.8) solid medium for 2-4 days at 28° C. Approximately 0.8×10⁹ Agrobacterium are suspended in LS-inf media supplemented with 100 μM As (Negrotto et al., supra). Bacteria were pre-induced in this medium for approximately 30-60 minutes.

[0280] Immature embryos from a suitable corn genotype were excised from 8-12 day old ears into liquid LS-inf+100 μM As. Embryos were rinsed once with fresh infection medium. Agrobacterium solution was then added and embryos were vortexed for 30 seconds and allowed to settle with the bacteria for about 5 minutes. The embryos were then transferred scutellum side up to LSAs medium and cultured in the dark for two to three days. Subsequently, between 20 and 25 embryos per petri plate were transferred to LSDc medium supplemented with cefotaxime (250 mg/1) and silver nitrate (1.6 mg/1) and cultured in the dark at 28° C. for 10 days.

[0281] Immature embryos, producing embryogenic callus were transferred to LSD1M0.5S medium. The cultures were selected on this medium for about 6 weeks with a subculture step at about 3 weeks. Surviving calli were transferred to Reg1 medium supplemented with mannose. Following culturing in the light (16 hour light/8 hour dark regiment), green tissues are then transferred to Reg2 medium without growth regulators and incubated for about 1-2 weeks. Plantlets were transferred to Magenta GA-7 boxes (Magenta Corp, Chicago Ill.) containing Reg3 medium and grown in the light.

[0282] Following transformation, selection, and regeneration, T0 plants were assayed for the presence of the pmi gene and the cry1Ab or vip3A coding sequence using TaqMan® analysis. Plants were also tested for the presence of the vector backbone. Transgenic maize plants negative for the vector backbone and comprising one copy of the transgene from the recombinant vector were transferred to a greenhouse and tested for insecticidal activity against a lepidopteran insect pest, for example, European corn borer and fall armyworm.

### Example 6. Expression Level and Pattern of Expression of Cry1Ab

[0283] This example describes T0 plant analysis to determine the level of expression of Cry1Ab protein in T0 transgenic corn plants stably transformed with the Cry1Ab-miRNA constructs described in Example 3.

[0284] Growth stages of corn are divided into vegetative stages (V) and reproductive stages (R). Subdivisions of the V stages are designated numerically as V1, V2, V3, and so forth through V(n), where (n) represents the last leaf stage before tasseling (VT). The reproductive stages are designated numerically as R1=silking through R6=maturity.

[0285] Transgenic corn plants selected in Example 5 were grown to the R1 stage under controlled conditions in a greenhouse. At the R1 stage, samples were taken from leaf, pollen and silks from multiple T0 plants for each construct and expression levels of the insect control transgene and protein were measured using qRT-PCR and ELISA, respectively. In addition, insect bioassays were performed on leaf and silk tissue to ensure that that the insecticidal protein encoded by the engineered transgene retained toxicity to a lepidopteran insect pest. Results of the ELISA assays are shown in Table 5 and FIG. 1.

[0286] Results demonstrate that corn plants comprising recombinant DNA constructs comprising an insecticidal protein-coding sequence operably linked to a DNA sequence encoding a microRNA (miRNA) element that is male tissue-specific or male tissue-preferred have lower expression of the insecticidal protein in male reproductive tissue compared to leaf tissue. Constructs 24374, 24375, 24376, 24377 and 24379 had significantly lower levels of Cry1Ab in pollen compared to leaf. All of these constructs, except 24379, have the miRNA element within the Cry1Ab coding sequence. Surprisingly, constructs comprising the miRNA element in the 5′UTR, except 24379, had significantly higher levels of Cry1Ab in the pollen compared to leaf

TABLE 5
Expression levels of Cry lAb protein in TO transgenic corn plants.

| | Insecticidal Protein | Cry 1Ab Concentration (ng/mg TSP) | |
|---|---|---|---|
| Construct | Coding-Sequence | Mean Leaf (±SE) | Mean Pollen (±SE) |
| 24366 | CrylAb-Control | 120.18 ± 09.10 | 203.17 ± 026.61 |
| 24377 | miR396b/tgene/CDS | 39.40 ± 02.93 | 6.81 ± 00.49 |
| 24376 | miR396b/motif/CDS | 40.15 ± 01.88 | 25.28 ± 01.44 |
| 24383 | miR396b/tgene/5’UTR | 162.81 ± 014.54 | 188.87 ± 018.31 |
| 24380 | miR156i/motif/5’UTR | 50.13 ± 02.10 | 122.56 ± 05.68 |
| 24374 | miR156i/motif/CDS | 72.57 ± 03.26 | 44.44 ± 06.20 |
| 24375 | miR171i/motif/CDS | 91.46 ± 04.20 | 38.06 ± 02.45 |
| 24381 | miR171i/motif/5’UTR | 67.57 ± 05.87 | 132.10 ± 020.09 |
| 24373 | miR159h/tgene/CDS | 153.15 ± 014.33 | 252.35 ± 08.83 |
| 24379 | miR159h/tgene/5’UTR | 233.45 ± 016.57 | 101.37 ± 010.69 |

[0287] Leaf and silk tissue from multiple T0 plants at the R1 stage were tested for insecticidal activity against European corn borer (ECB; Ostrinia nubilalis) and corn earworm (CEW; Helicoverpa zea), respectively, using tissue excision bioassays. Briefly, plant tissue (leaf and/or silks) is excised from an individual plant and placed in a sealable container. Each tissue sample is infested with neonate larvae of a lepidopteran target pest, then incubated at room temperature for about 5 days.

[0288] Results of the bioassays, shown in Table 6, demonstrate that the Cry1Ab-miRNA constructs of the invention express at high enough levels in leaf and silk to control the intended target pest, with the exception of the 24377 construct. Although 100% of the T0 plants tested that comprised the 24377 construct produced 100% mortality to ECB in a leaf bioassay, none of the T0 plants produced 100% mortality to CEW in silk bioassays.

TABLE 6
Results of insect bioassays of tissue from
TO plants comprising DNA constructs.

| | | % of T0 plants with 100% | |
|---|---|---|---|
| | Insecticidal | insect mortality | |
| | Protein Coding- | ECB Leaf | CEW Silk |
| Construct | Sequence | Bioassay | Bioassay |
| 24366 | CrylAb-Control | 100 | 68.4 |
| 24377 | miR396b/tgene/CDS | 100 | 0.0 |
| 24376 | miR396b/motif/CDS | 100 | 27.3 |
| 24383 | miR396b/tgene/5'UTR | 91.3 | 95.2 |
| 24380 | miR156i/motif/5'UTR | 95.8 | 21.05 |
| 24374 | miR156i/motif/CDS | 100 | 80.0 |
| 24375 | miR171i/motif/CDS | 100 | 95.4 |
| 24381 | miR171i/motif/5'UTR | 87.5 | 72.7 |
| 24373 | miR159h/tgene/CDS | 92.3 | 75.0 |
| 24379 | miR159h/tgene/5'UTR | 100 | 95.2 |

### Example 7. Expression Level and Pattern of Expression of Vip3A

[0289] This example describes T0 plant analysis to determine the level of expression of Vip3A protein in T0 transgenic corn plants stably transformed with the Vip3A-miRNA constructs described in Example 3.

[0290] Transgenic corn plants selected in Example 5 were grown to the R1 stage under controlled conditions in a greenhouse. At the R1 stage, samples were taken from leaf, pollen and silks from multiple T0 events for each construct and expression levels of the insect control transgene and protein were measured using qRT-PCR and ELISA, respectively. In addition, insect bioassays were performed on leaf (fall armyworm; FAW) and silk tissue (corn earworm; CEW) to ensure that the Vip3 protein encoded by the engineered transgene retained toxicity to a lepidopteran insect pest. Results of the ELISA assays and bioassays are shown in Table 7. Leaf and silk bioassay results are shown as “++,” “+,” or “−” indicating the percentage of T0 events that had insecticidal leaves and/or silks, where “++”=≥50% of the events, “+”=<50% of the events and “−”=0% of the events.

TABLE 7
Vip3A expression levels and bioassay results of T0 events.

| | | | | | Avg % Reduction | Leaves | Silks |
|---|---|---|---|---|---|---|---|
| | Avg. Vip3A Protein Level | | | | Anther vs. Leaf (vs. | Toxic to | Toxic to |
| Construct | Leaf | Anther | Pollen | Silk | 23705 Control) | FAW | CEW |
| 23705 | 1172.53 | 498.17 | 129.00 | 431.95 | 0.00 | + | + |
| 23712 | 1287.99 | 180.63 | 166.58 | 398.22 | 63.74 | ++ | ++ |
| 23708 | 875.32 | 101.36 | 242.03 | 231.98 | 79.65 | ++ | ++ |
| 23711 | 940.86 | 676.72 | 352.70 | 550.10 | −35.84 | ++ | ++ |
| 23713 | 275.94 | 54.05 | 31.33 | 64.18 | 89.15 | ++ | − |
| 23715 | 664.40 | 279.15 | 181.72 | 98.48 | 43.97 | ++ | ++ |
| 23714 | 866.44 | 173.89 | 174.28 | 243.80 | 65.09 | ++ | ++ |
| 23718 | 201.97 | 71.51 | 12.19 | 120.68 | 85.64 | + | − |
| 23716 | 265.74 | 24.51 | 14.69 | 80.52 | 95.08 | − | − |
| 23717 | 174.26 | 24.66 | 29.50 | 164.77 | 95.05 | + | − |

[0291] Results demonstrate that transgenic corn events (plants) comprising recombinant DNA constructs comprising a Vip3 insecticidal protein-coding sequence operably linked to a DNA sequence encoding a microRNA (miRNA) element that is male tissue-specific or male tissue-preferred have lower expression of the Vip3 protein in male reproductive tissue compared to leaf tissue. When compared to the positive control, constructs 23712, 23708, 23713, 23714, 23718, 23716 and 23717 had significantly lower levels of Vip3 in anther, the tissue where the miR2275 RNA is active, compared to leaf. Several of the constructs not only had lower Vip3 levels in anthers but also had lower levels of Vip3 protein in tissues where the miR2275 is not active. Such constructs still have utility if the lower Vip3 levels in other tissues does not go below the insecticidal level. This was the case for constructs, 23708, 23714 and 23715 where the Vip3 level in leaf and silks was lower than the control but yet leaf tissue and silk tissue from plant comprising these constructs was still insecticidal to a target pest. Construct 23713 had lower Vip3 protein levels in leaf and silk tissue compared to the positive control but only the leaf tissue from transgenic events comprising that construct were insecticidal to a target pest. All of the constructs having the miR2275 element within the Vip3 coding sequence produced plants that had lower Vip3 levels in all tissues analyzed. However, transgenic events comprising two of these constructs, 23718 and 23717, had leaves that were insecticidal to a target pest. The constructs with the highest reduction of Vip3 protein in anthers while maintaining insecticidal activity in both leave and silks were 23708, 23714 and 23712. All three of these constructs comprise the 3p arm of miR2275, have a motif initiator sequence type, and have the miR2275 initiator sequence located in the 3′ UTR of the Vip3 gene.

[0292] Next generation T1 plants from transgenic T0 events comprising constructs 23705, 23712, 23708, 23713 and 23717 were tested and analyzed as described above. The selectable marker construct, comprising a phosphomannose isomerase (PMI) gene, and not comprising a miR2275 initiator sequence, was used as a negative control. Results of the T1 plant analysis are shown in Table 8.

TABLE 8
Vip3 expression levels and bioassay results of T1 plants.

| | Avg. Vip3A | | Avg % Reduction | Leaves | Silks | Avg. PMI Protein | |
|---|---|---|---|---|---|---|---|
| | Protein Level | | Anther vs. Leaf (vs. | Toxic to | Toxic to | Level | |
| Construct | Leaf | Anther | 23705 Control) | FAW | CEW | Leaf | Anther |
| 23705 | 358.79 | 373.01 | 0.00 | ++ | + | 43.50 | 17.33 |
| 23708 | 425.44 | 91.59 | 75.44 | ++ | + | 49.11 | 19.71 |
| 23712 | 326.87 | 116.00 | 68.90 | ++ | + | 46.59 | 23.10 |

[0293] As with T0 events, T1 plants comprising constructs 23708 and 23712 had significantly lower Vip3 protein level in anthers compared to the positive control, due to the presence of the miR2275 initiator sequence and the endogenous activity of the miR2275 microRNA. The PMI expression cassette, that did not comprise a microRNA initiator sequence, expressed equal levels of PMI protein across all construct treatments and tissues. These results demonstrate that both miR2275a and miR2275b can recognize their respective initiator sequences in planta to down regulate the expression of an insecticidal protein like Vip3 in male reproductive tissue or corn.

### Example 8. Genome Editing in Plant Cells In Situ to Generate Modified Chimeric Proteins

[0294] This example illustrates the use of genome editing of a plant cell genome in situ to incorporate mutations, to make a DNA construct described herein (including but not limited to a DNA construct described in Examples 3) by incorporating a miRNA element into a coding sequence for a wild-type Cry1Ab or Vip3 insecticidal protein or into a coding sequence for an already modified Cry1Ab or Vip3 protein.

[0295] Targeted genome modification, also known as genome editing, is useful for introducing mutations in specific DNA sequences. These genome editing technologies, which include zinc finger nucleases (ZNFs), transcription activator-like effector nucleases (TALENS), meganucleases and clustered regularly interspaced short palindromic repeats (CRISPR) have been successfully applied to over 50 different organisms including crop plants. See, e.g., Belhaj, K., et al., Plant Methods 9, 39 (2013); Jiang, W., et al., Nucleic Acids Res, 41, e188 (2013)). The CRISPR/Cas system for genome editing is based on transient expression of Cas9 nuclease and an engineered single guide RNA (sgRNA) that specifies the targeted polynucleotide sequence.

[0296] Cas9 is a large monomeric DNA nuclease guided to a DNA target sequence with the aid of a complex of two 20-nucleotide (nt) non-coding RNAs: CRIPSR RNA (crRNA) and trans-activating crRNA (tracrRNA), which are functionally available as single synthetic RNA chimera. The Cas9 protein contains two nuclease domains homologous to RuvC and HNH nucleases. The HNH nuclease domain cleaves the complementary DNA strand, whereas the RuvC-like domain cleaves the non-complementary strand and, as a result, a blunt cut is introduced in the target DNA.

[0297] When the Cas9 and the sgRNA are transiently expressed in living maize cells, double strand breaks (DSBs) in the specific targeted DNA is created in the transgenic maize cell. Mutation at the break site is introduced through the non-homologous end joining and homology-directed DNA repair pathways.

[0298] Specific mutations are introduced into a cry1Ab coding sequence, for example SEQ ID NO: 67, or a vip3 coding sequence, for example SEQ ID NO: 118, or a modified cry1Ab and/or vip3 coding sequence, through the use of recombinant plasmids expressing the Cas9 nuclease and the sgRNA target that is maize codon optimized for the cry1Ab or vip3 or modified cry1Ab or vip3 sequence in the transgenic maize. Implementation of the method is by an agroinfiltration method with Agrobacterium tumefaciens carrying the binary plasmid harboring the specified target sequence of interest. After the sgRNA binds to the target insecticidal protein coding sequence, the Cas9 nuclease makes specific cuts into the coding sequence and introduces the desired mutation(s) during DNA repair, for example introducing a miRNA element into the cry1Ab coding sequence. Thus, a now mutated cry1Ab insecticidal protein coding sequence will encode a Cry1Ab-miRNA insecticidal protein.

[0299] Plant cells comprising the genome edited cry1Ab-miRNA insecticidal protein coding sequences are screened by PCR and sequencing. Calli that harbor genome edited cry1Ab-miRNA insecticidal protein coding sequences are induced to regenerate plants for phenotype evaluation for insecticidal activity of the expressed insecticidal protein against a lepidopteran pest insect and tested for reduced expression in the pollen as compared to leaf tissue.

[0300] It should be understood that the examples and embodiments described herein are for illustrative purposes only and that various modifications or changes in light thereof of the description will be suggested to persons skilled in the art and are to be included within the spirit and purview of this application and the scope of the appended claims.

[0301] All publications and patent applications mentioned in this specification are indicative of the level of skill of those skilled in the art that this invention pertains. All publications and patent applications are herein incorporated by reference to the same extent as if each individual publication or patent application was specifically and individually indicated to be incorporated by reference.

1. A recombinant DNA construct comprising an insecticidal protein-coding sequence operably linked to a DNA sequence encoding a microRNA (miRNA) element that is male tissue-specific or male tissue-preferred in a corn plant, wherein said miRNA element is heterologous with respect to said insecticidal protein-coding sequence.

2. The recombinant DNA construct of claim 1, wherein said miRNA element is comprised within a 5′ untranslated region of said insecticidal protein-coding sequence, or within a 3′ untranslated region of said insecticidal protein-coding sequence, or within the insecticidal protein-coding sequence.

3. The recombinant DNA construct of claim 1, wherein said male tissue is pollen and/or tapetum.

4. The recombinant DNA construct of claim 1, wherein said miRNA element comprises a sequence that encodes at least one miRNA initiator sequence.

5. The recombinant DNA construct of claim 4, wherein said miRNA initiator sequence is selected from the group consisting of SEQ ID NO: 29-34 or SEQ ID NO: 94-97.

6. The recombinant DNA construct of claim 4, wherein said sequence that encodes said miRNA initiator sequence is selected from the group consisting of SEQ ID NO:41-46 or SEQ ID NO: 98-101.

7.-8. (canceled)

9. The recombinant DNA construct of claim 4, wherein said miRNA element is selected from the group consisting of SEQ ID NO: 10-18 or SEQ ID NO: 74-78.

10.-16. (canceled)

17. A recombinant vector comprising the DNA construct of claim 1.

18. (canceled)

19. A transgenic corn plant comprising the DNA construct of claim 1.

20. A seed, progeny, or plant part of the transgenic corn plant of claim 19, wherein said seed, progeny, or plant part comprises the DNA construct.

21. A method of making a DNA construct comprising identifying an endogenous male tissue-specific or male tissue-preferred corn microRNA (miRNA), constructing an miRNA element that encodes at least one miRNA initiator sequence that is recognized by said corn miRNA and operably linking said miRNA element to an insecticidal protein-coding sequence.

22.-25. (canceled)

26. A method of selectively reducing the expression of a recombinant insecticidal protein in a male reproductive tissue of a transgenic corn plant comprising expressing in said transgenic corn plant a chimeric gene comprising an insecticidal protein-coding sequence encoding said recombinant insecticidal protein and at least a first male tissue-specific miRNA element or a male tissue-preferred miRNA element operably linked to said insecticidal protein-coding sequence, wherein said miRNA element encodes at least one miRNA initiator sequence.

27. The method of claim 26, wherein said miRNA element is comprised within a 5′ untranslated region of said insecticidal protein-coding sequence, or within a 3′ untranslated region of said insecticidal protein-coding sequence or within the insecticidal protein-coding sequence.

28. The method of claim 26, wherein the miRNA element comprises at least two miRNA initiator sequences.

29. The method of claim 26, wherein the wherein said male tissue is pollen and/or tapetum.

30-69. (canceled)

70. A method of mitigating the impact of a transgenic corn plant expressing an insecticidal protein on non-target insects exposed to pollen from said transgenic corn plant, comprising introducing into a corn plant the DNA construct of claim 1, wherein the DNA construct causes the insecticidal protein to be expressed at a lower level in pollen compared to leaf, thus mitigating the impact of the transgenic corn pollen on non-target insects exposed to said pollen.

The application's sequence listing, which the Patent Office published only in electronic form, follows.

SEQUENCE LISTING (125 sequences)

SEQ ID NO: 1 - RNA, 63 nt, Artificial Sequence
  24373 miR159h-3p target insertion sequence
acuagcauccuuuucauugauaagaagagcaccguucacuccaacugcaaacuuguggcuagu

SEQ ID NO: 2 - RNA, 63 nt, Artificial Sequnece
  24374 miR156i-3p target insertion sequence
acuagcacauccaacacgcacgagaugacagauagagcagugagcagaccaucucuuacuagu

SEQ ID NO: 3 - RNA, 60 nt, Artificial Sequence
  24375 miR171i-5p target insertion sequence
acuagcaucucuguugccuuuuugauugaaccgugccaacagcuuguuggauuuacuagu

SEQ ID NO: 4 - RNA, 63 nt, Artificial Sequence
  24376 miR396b-3p target insertion sequence
acuagcgacgaccccaaaggacagguuucccacagcuuuauugaacaauuguuugcaucuagu

SEQ ID NO: 5 - RNA, 60 nt, Artificial Sequence
  24377 miR396b-3p target insertion sequence
acuaguccuuucucucucuuucuuucucucugcuuuauugaacuucucaaaguuacuagu

SEQ ID NO: 6 - RNA, 57 nt, Artificial Sequence
  24379 miR159h-3p target insertion sequence
cuagcauccuuuucauugauaagaagagcaccguucacuccaacugcaaacuugugg

SEQ ID NO: 7 - RNA, 56 nt, Artificial Sequence
  24380 miR156i-3p target insertion sequence
cuagacauccaacacgcacgagaugacagauagagcagugagcugaccaucucuua

SEQ ID NO: 8 - RNA, 54 nt, Artificial Sequence
  24381 miR171i-5p target insertion sequence
cuagcaucucuguugccuuuuugauugaaccgugccaacagcuuguuggauuua

SEQ ID NO: 9 - RNA, 54 nt, Artificial Sequence
  24383 miR396b-3p target insertion sequence
cuaguccuuucucucucuuucuuucucucugcuuuauugaacuucucaaaguua

SEQ ID NO: 10 - DNA, 63 bp, Artificial Sequence
  miR159h-3p target insertion sequence
actagcatccttttcattgataagaagagcaccgttcactccaactgcaaacttgtggctagt

SEQ ID NO: 11 - DNA, 63 bp, Artificial Sequence
  24374 miR156i-3p target insertion sequence
actagcacatccaacacgcacgagatgacagatagagcagtgagcagaccatctcttactagt

SEQ ID NO: 12 - DNA, 60 bp, Artificial Sequence
  24375 miR171i-5p target insertion sequence
actagcatctctgttgcctttttgattgaaccgtgccaacagcttgttggatttactagt

SEQ ID NO: 13 - DNA, 63 bp, Artificial Sequence
  24376 miR396b-3p target insertion sequence
actagcgacgaccccaaaggacaggtttcccacagctttattgaacaattgtttgcatctagt

SEQ ID NO: 14 - DNA, 60 bp, Artificial Sequence
  24377 miR396b-3p target insertion sequence
actagtcctttctctctctttctttctctctgctttattgaacttctcaaagttactagt

SEQ ID NO: 15 - DNA, 57 bp, Artificial Sequence
  24379 miR159h-3p target insertion sequence
ctagcatccttttcattgataagaagagcaccgttcactccaactgcaaacttgtgg

SEQ ID NO: 16 - DNA, 56 bp, Artificial Sequence
  24380 miR156i-3p target insertion sequence
ctagacatccaacacgcacgagatgacagatagagcagtgagctgaccatctctta

SEQ ID NO: 17 - DNA, 54 bp, Artificial Sequence
  24381 miR171i-5p target insertion sequence
ctagcatctctgttgcctttttgattgaaccgtgccaacagcttgttggattta

SEQ ID NO: 18 - DNA, 54 bp, Artificial Sequence
  24383 miR396b-3p target insertion sequence
ctagtcctttctctctctttctttctctctgctttattgaacttctcaaagtta

SEQ ID NO: 19 - DNA, 5098 bp, Artificial Sequence
  24366 cry1Ab expression cassette
ctgcagtgcagcgtgacccggtcgtgcccctctctagagataatgagcattgcatgtctaagttataaaaaattaccacatattttttttgtcacacttgtttgaagtgcagtttatctatctttatacatatatttaaactttactctacgaataatataatctatagtactacaataatatcagtgttttagagaatcatataaatgaacagttagacatggtctaaaggacaattgagtattttgacaacaggactctacagttttatctttttagtgtgcatgtgttctcctttttttttgcaaatagcttcacctatataatacttcatccattttattagtacatccatttagggtttagggttaatggtttttatagactaatttttttagtacatctattttattctattttagcctctaaattaagaaaactaaaactctattttagtttttttatttaataatttagatataaaatagaataaaataaagtgactaaaaattaaacaaataccctttaagaaattaaaaaaactaaggaaacatttttcttgtttcgagtagataatgccagcctgttaaacgccgtcgacgagtctaacggacaccaaccagcgaaccagcagcgtcgcgtcgggccaagcgaagcagacggcacggcatctctgtcgctgcctctggacccctctcgagagttccgctccaccgttggacttgctccgctgtcggcatccagaaattgcgtggcggagcggcagacgtgagccggcacggcaggcggcctcctcctcctctcacggcaccggcagctacgggggattcctttcccaccgctccttcgctttcccttcctcgcccgccgtaataaatagacaccccctccacaccctctttccccaacctcgtgttgttcggagcgcacacacacacaaccagatctcccccaaatccacccgtcggcacctccgcttcctaggtacgccgctcgtcctccccccccccccctctctaccttctctagatcggcgttccggtccatagttagggcccggtagttctacttctgttcatgtttgtgttagatccgtgtttgtgttagatccgtgctgctagcgttcgtacacggatgcgacctgtacgtcagacacgttctgattgctaacttgccagtgtttctctttggggaatcctgggatggctctagccgttccgcagacgggatcgatttcatgattttttttgtttcgttgcatagggtttggtttgcccttttcctttatttcaatatatgccgtgcacttgtttgtcgggtcatcttttcatgcttttttttgtcttggttgtgatgatgtggtctggttgggcggtcgttctagatcggagtagaattctgtttcaaactacctggtggatttattaattttggatctgtatgtgtgtgccatacatattcatagttacgaattgaagatgatggatggaaatatcgatctaggataggtatacatgttgatgcgggttttactgatgcatatacagagatgctttttgttcgcttggttgtgatgatgtggtgtggttgggcggtcgttcattcgttctagatcggagtagaatactgtttcaaactacctggtgtatttattaattttggaactgtatgtgtgtgtcatacatcttcatagttacgagtttaagatggatggaaatatcgatctaggataggtatacatgttgatgtgggttttactgatgcatatacatgatggcatatgcagcatctattcatatgctctaaccttgagtacctatctattataataaacaagtatgttttataattattttgatcttgatatacttggatgatggcatatccagcagctatatgtggatttttttagccctgccttcatacgctatttatttgcttggtactgtttcttttgtcgatgctcaccctgttgtttggtgttacttctgcaggatcctctaagtagcagccatggacaacaaccccaacatcaacgagtgcatcccctacaactgcctgagcaaccccgaggtggaggtgctgggcggcgagcgcatcgagaccggctacacccccatcgacatcagcctgagcctgacccagttcctgctgagcgagttcgtgcccggcgccggcttcgtgctgggcctggtggacatcatctggggcatcttcggccccagccagtgggacgccttcctggtgcagatcgagcagttgataaaccaacgcatagaggaattcgcccgcaaccaggccatcagccgcctggagggcctgagcaacctgtaccaaatctacgccgagagcttccgcgagtgggaggccgaccccaccaaccccgccctgcgcgaggagatgcgcatccagttcaacgacatgaacagcgccctgaccaccgccatccccctgttcgccgtgcagaactaccaggtgcccctgctgagcgtgtacgtgcaggccgccaacctgcacctgagcgtgctgcgcgacgtcagcgtgttcggccagcgctggggcttcgacgccgccaccatcaacagccgctacaacgacctgacccgcctgatcggcaactacaccgaccacgccgtgcgctggtacaacaccggcctggagcgcgtgtgggggcccgacagccgcgactggatcaggtacaaccagttccgccgcgagctgaccctgaccgtgctggacatcgtgagcctgttccccaactacgacagccgcacctaccccatccgcaccgtgagccagctgacccgcgagatttacaccaaccccgtgctggagaacttcgacggcagcttccgcggcagcgcccagggcatcgagggcagcatccgcagcccccacctgatggacatcctgaacagcatcaccatctacaccgacgcccaccgcggcgagtactactggagcggccaccagatcatggccagccccgtcggcttcagcggccccgagttcaccttccccctgtacggcacgatgggcaacgctgcacctcagcagcgcatcgtggcacagctgggccagggagtgtaccgcaccctgagcagcaccctgtaccgtcgacctttcaacatcggcatcaacaaccagcagctgagcgtgctggacggcaccgagttcgcctacggcaccagcagcaacctgcccagcgccgtgtaccgcaagagcggcaccgtggacagcctggacgagatcccccctcagaacaacaacgtgccacctcgacagggcttcagccaccgtctgagccacgtgagcatgttccgcagtggcttcagcaacagcagcgtgagcatcatccgtgcacctatgttcagctggattcaccgcagtgccgagttcaacaacatcatccccagcagccagatcacccagatccccctgaccaagagcaccaacctgggcagcggcaccagcgtggtgaagggccccggcttcaccggcggcgacatcctgcgccgcaccagccccggccagatcagcaccctgcgcgtgaacatcaccgcccccctgagccagcgctaccgcgtccgcatccgctacgccagcaccaccaacctgcagttccacaccagcatcgacggccgccccatcaaccagggcaacttcagcgccaccatgagcagcggcagcaacctgcagagcggcagcttccgcaccgtgggcttcaccacccccttcaacttcagcaacggcagcagcgtgttcaccctgagcgcccacgtgttcaacagcggcaacgaggtgtacatcgaccgcatcgagttcgtgcccgccgaggtgaccttcgaggccgagtacgacctggagagggctcagaaggccgtgaacgagctgttcaccagcagcaaccagatcggcctgaagaccgacgtgaccgactaccacatcgaccaggtgagcaacctggtggagtgcttaagcgacgagttctgcctggacgagaagaaggagctgagcgagaaggtgaagcacgccaagcgcctgagcgacgagcgcaacctgctgcaggaccccaacttccgcggcatcaaccgccagctggaccgcggctggcgaggcagcaccgatatcaccatccagggcggcgacgacgtgttcaaggagaactacgtgaccctgctgggcaccttcgacgagtgctaccccacctacctgtaccagaagatcgacgagagcaagctgaaggcctacacccgctaccagctgcgcggctacatcgaggacagccaggacctggaaatctacctgatccgctacaacgcgaagcacgagaccgtgaacgtgcccggcaccggcagcctgtggcccctgagcgcccccagccccatcggcaagtgcactagtcaccacagccaccacttcagcctggacatcgacgtgggctgcaccgacctgaacgaggacctgggcgtgtgggtgatcttcaagatcaagacccaggacggccacgcccgcctgggcaatctagagttcctggaggagaagcccctggtgggcgaggccctggcccgcgtgaagcgtgctgagaagaagtggcgcgacaagcgcgagaagctggagtgggagaccaacatcgtgtacaaggaggccaaggagagcgtggacgccctgttcgtgaacagccagtacgaccgcctgcaggccgacaccaacatcgccatgatccacgccgccgacaagcgcgtgcacagcattcgcgaggcctacctgcccgagctgagcgtgatccccggtgtgaacgccgccatcttcgaggaactcgagggccgcatctaggagctctatgatcgttcaaacatttggcaataaagtttcttaagattgaatcctgttgccggtcttgcgatgattatcatataatttctgttgaattacgttaagcatgtaataattaacatgtaatgcatgacgttatttatgagatgggtttttatgattagagtcccgcaattatacatttaatacgcgatagaaaacaaaatatagcgcgcaaactaggataaattatcgcgcgcggtgtcatctatgttactagatc

SEQ ID NO: 20 - DNA, 4171 bp, Artificial Sequence
  24373 cry1Ab expression cassette
gtacgccgctcgtcctccccccccccccctctctaccttctctagatcggcgttccggtccatagttagggcccggtagttctacttctgttcatgtttgtgttagatccgtgtttgtgttagatccgtgctgctagcgttcgtacacggatgcgacctgtacgtcagacacgttctgattgctaacttgccagtgtttctctttggggaatcctgggatggctctagccgttccgcagacgggatcgatttcatgattttttttgtttcgttgcatagggtttggtttgcccttttcctttatttcaatatatgccgtgcacttgtttgtcgggtcatcttttcatgcttttttttgtcttggttgtgatgatgtggtctggttgggcggtcgttctagatcggagtagaattctgtttcaaactacctggtggatttattaattttggatctgtatgtgtgtgccatacatattcatagttacgaattgaagatgatggatggaaatatcgatctaggataggtatacatgttgatgcgggttttactgatgcatatacagagatgctttttgttcgcttggttgtgatgatgtggtgtggttgggcggtcgttcattcgttctagatcggagtagaatactgtttcaaactacctggtgtatttattaattttggaactgtatgtgtgtgtcatacatcttcatagttacgagtttaagatggatggaaatatcgatctaggataggtatacatgttgatgtgggttttactgatgcatatacatgatggcatatgcagcatctattcatatgctctaaccttgagtacctatctattataataaacaagtatgttttataattattttgatcttgatatacttggatgatggcatatccagcagctatatgtggatttttttagccctgccttcatacgctatttatttgcttggtactgtttcttttgtcgatgctcaccctgttgtttggtgttacttctgcaggatcctctaagtagcagccatggacaacaaccccaacatcaacgagtgcatcccctacaactgcctgagcaaccccgaggtggaggtgctgggcggcgagcgcatcgagaccggctacacccccatcgacatcagcctgagcctgacccagttcctgctgagcgagttcgtgcccggcgccggcttcgtgctgggcctggtggacatcatctggggcatcttcggccccagccagtgggacgccttcctggtgcagatcgagcagttgataaaccaacgcatagaggaattcgcccgcaaccaggccatcagccgcctggagggcctgagcaacctgtaccaaatctacgccgagagcttccgcgagtgggaggccgaccccaccaaccccgccctgcgcgaggagatgcgcatccagttcaacgacatgaacagcgccctgaccaccgccatccccctgttcgccgtgcagaactaccaggtgcccctgctgagcgtgtacgtgcaggccgccaacctgcacctgagcgtgctgcgcgacgtcagcgtgttcggccagcgctggggcttcgacgccgccaccatcaacagccgctacaacgacctgacccgcctgatcggcaactacaccgaccacgccgtgcgctggtacaacaccggcctggagcgcgtgtgggggcccgacagccgcgactggatcaggtacaaccagttccgccgcgagctgaccctgaccgtgctggacatcgtgagcctgttccccaactacgacagccgcacctaccccatccgcaccgtgagccagctgacccgcgagatttacaccaaccccgtgctggagaacttcgacggcagcttccgcggcagcgcccagggcatcgagggcagcatccgcagcccccacctgatggacatcctgaacagcatcaccatctacaccgacgcccaccgcggcgagtactactggagcggccaccagatcatggccagccccgtcggcttcagcggccccgagttcaccttccccctgtacggcacgatgggcaacgctgcacctcagcagcgcatcgtggcacagctgggccagggagtgtaccgcaccctgagcagcaccctgtaccgtcgacctttcaacatcggcatcaacaaccagcagctgagcgtgctggacggcaccgagttcgcctacggcaccagcagcaacctgcccagcgccgtgtaccgcaagagcggcaccgtggacagcctggacgagatcccccctcagaacaacaacgtgccacctcgacagggcttcagccaccgtctgagccacgtgagcatgttccgcagtggcttcagcaacagcagcgtgagcatcatccgtgcacctatgttcagctggattcaccgcagtgccgagttcaacaacatcatccccagcagccagatcacccagatccccctgaccaagagcaccaacctgggcagcggcaccagcgtggtgaagggccccggcttcaccggcggcgacatcctgcgccgcaccagccccggccagatcagcaccctgcgcgtgaacatcaccgcccccctgagccagcgctaccgcgtccgcatccgctacgccagcaccaccaacctgcagttccacaccagcatcgacggccgccccatcaaccagggcaacttcagcgccaccatgagcagcggcagcaacctgcagagcggcagcttccgcaccgtgggcttcaccacccccttcaacttcagcaacggcagcagcgtgttcaccctgagcgcccacgtgttcaacagcggcaacgaggtgtacatcgaccgcatcgagttcgtgcccgccgaggtgaccttcgaggccgagtacgacctggagagggctcagaaggccgtgaacgagctgttcaccagcagcaaccagatcggcctgaagaccgacgtgaccgactaccacatcgaccaggtgagcaacctggtggagtgcttaagcgacgagttctgcctggacgagaagaaggagctgagcgagaaggtgaagcacgccaagcgcctgagcgacgagcgcaacctgctgcaggaccccaacttccgcggcatcaaccgccagctggaccgcggctggcgaggcagcaccgatatcaccatccagggcggcgacgacgtgttcaaggagaactacgtgaccctgctgggcaccttcgacgagtgctaccccacctacctgtaccagaagatcgacgagagcaagctgaaggcctacacccgctaccagctgcgcggctacatcgaggacagccaggacctggaaatctacctgatccgctacaacgcgaagcacgagaccgtgaacgtgcccggcaccggcagcctgtggcccctgagcgcccccagccccatcggcaagtgcactagcatccttttcattgataagaagagcaccgttcactccaactgcaaacttgtggctagtcaccacagccaccacttcagcctggacatcgacgtgggctgcaccgacctgaacgaggacctgggcgtgtgggtgatcttcaagatcaagacccaggacggccacgcccgcctgggcaatctagagttcctggaggagaagcccctggtgggcgaggccctggcccgcgtgaagcgtgctgagaagaagtggcgcgacaagcgcgagaagctggagtgggagaccaacatcgtgtacaaggaggccaaggagagcgtggacgccctgttcgtgaacagccagtacgaccgcctgcaggccgacaccaacatcgccatgatccacgccgccgacaagcgcgtgcacagcattcgcgaggcctacctgcccgagctgagcgtgatccccggtgtgaacgccgccatcttcgaggaactcgagggccgcatctaggagctctatgatcgttcaaacatttggcaataaagtttcttaagattgaatcctgttgccggtcttgcgatgattatcatataatttctgttgaattacgttaagcatgtaataattaacatgtaatgcatgacgttatttatgagatgggtttttatgattagagtcccgcaattatacatttaatacgcgatagaaaacaaaatatagcgcgcaaactaggataaattatcgcgcgcggtgtcatctatgttactagatc

SEQ ID NO: 21 - DNA, 5155 bp, Artificial Seuqence
  24374 cry1Ab expression cassette
ctgcagtgcagcgtgacccggtcgtgcccctctctagagataatgagcattgcatgtctaagttataaaaaattaccacatattttttttgtcacacttgtttgaagtgcagtttatctatctttatacatatatttaaactttactctacgaataatataatctatagtactacaataatatcagtgttttagagaatcatataaatgaacagttagacatggtctaaaggacaattgagtattttgacaacaggactctacagttttatctttttagtgtgcatgtgttctcctttttttttgcaaatagcttcacctatataatacttcatccattttattagtacatccatttagggtttagggttaatggtttttatagactaatttttttagtacatctattttattctattttagcctctaaattaagaaaactaaaactctattttagtttttttatttaataatttagatataaaatagaataaaataaagtgactaaaaattaaacaaataccctttaagaaattaaaaaaactaaggaaacatttttcttgtttcgagtagataatgccagcctgttaaacgccgtcgacgagtctaacggacaccaaccagcgaaccagcagcgtcgcgtcgggccaagcgaagcagacggcacggcatctctgtcgctgcctctggacccctctcgagagttccgctccaccgttggacttgctccgctgtcggcatccagaaattgcgtggcggagcggcagacgtgagccggcacggcaggcggcctcctcctcctctcacggcaccggcagctacgggggattcctttcccaccgctccttcgctttcccttcctcgcccgccgtaataaatagacaccccctccacaccctctttccccaacctcgtgttgttcggagcgcacacacacacaaccagatctcccccaaatccacccgtcggcacctccgcttcctaggtacgccgctcgtcctccccccccccccctctctaccttctctagatcggcgttccggtccatagttagggcccggtagttctacttctgttcatgtttgtgttagatccgtgtttgtgttagatccgtgctgctagcgttcgtacacggatgcgacctgtacgtcagacacgttctgattgctaacttgccagtgtttctctttggggaatcctgggatggctctagccgttccgcagacgggatcgatttcatgattttttttgtttcgttgcatagggtttggtttgcccttttcctttatttcaatatatgccgtgcacttgtttgtcgggtcatcttttcatgcttttttttgtcttggttgtgatgatgtggtctggttgggcggtcgttctagatcggagtagaattctgtttcaaactacctggtggatttattaattttggatctgtatgtgtgtgccatacatattcatagttacgaattgaagatgatggatggaaatatcgatctaggataggtatacatgttgatgcgggttttactgatgcatatacagagatgctttttgttcgcttggttgtgatgatgtggtgtggttgggcggtcgttcattcgttctagatcggagtagaatactgtttcaaactacctggtgtatttattaattttggaactgtatgtgtgtgtcatacatcttcatagttacgagtttaagatggatggaaatatcgatctaggataggtatacatgttgatgtgggttttactgatgcatatacatgatggcatatgcagcatctattcatatgctctaaccttgagtacctatctattataataaacaagtatgttttataattattttgatcttgatatacttggatgatggcatatccagcagctatatgtggatttttttagccctgccttcatacgctatttatttgcttggtactgtttcttttgtcgatgctcaccctgttgtttggtgttacttctgcaggatcctctaagtagcagccatggacaacaaccccaacatcaacgagtgcatcccctacaactgcctgagcaaccccgaggtggaggtgctgggcggcgagcgcatcgagaccggctacacccccatcgacatcagcctgagcctgacccagttcctgctgagcgagttcgtgcccggcgccggcttcgtgctgggcctggtggacatcatctggggcatcttcggccccagccagtgggacgccttcctggtgcagatcgagcagttgataaaccaacgcatagaggaattcgcccgcaaccaggccatcagccgcctggagggcctgagcaacctgtaccaaatctacgccgagagcttccgcgagtgggaggccgaccccaccaaccccgccctgcgcgaggagatgcgcatccagttcaacgacatgaacagcgccctgaccaccgccatccccctgttcgccgtgcagaactaccaggtgcccctgctgagcgtgtacgtgcaggccgccaacctgcacctgagcgtgctgcgcgacgtcagcgtgttcggccagcgctggggcttcgacgccgccaccatcaacagccgctacaacgacctgacccgcctgatcggcaactacaccgaccacgccgtgcgctggtacaacaccggcctggagcgcgtgtgggggcccgacagccgcgactggatcaggtacaaccagttccgccgcgagctgaccctgaccgtgctggacatcgtgagcctgttccccaactacgacagccgcacctaccccatccgcaccgtgagccagctgacccgcgagatttacaccaaccccgtgctggagaacttcgacggcagcttccgcggcagcgcccagggcatcgagggcagcatccgcagcccccacctgatggacatcctgaacagcatcaccatctacaccgacgcccaccgcggcgagtactactggagcggccaccagatcatggccagccccgtcggcttcagcggccccgagttcaccttccccctgtacggcacgatgggcaacgctgcacctcagcagcgcatcgtggcacagctgggccagggagtgtaccgcaccctgagcagcaccctgtaccgtcgacctttcaacatcggcatcaacaaccagcagctgagcgtgctggacggcaccgagttcgcctacggcaccagcagcaacctgcccagcgccgtgtaccgcaagagcggcaccgtggacagcctggacgagatcccccctcagaacaacaacgtgccacctcgacagggcttcagccaccgtctgagccacgtgagcatgttccgcagtggcttcagcaacagcagcgtgagcatcatccgtgcacctatgttcagctggattcaccgcagtgccgagttcaacaacatcatccccagcagccagatcacccagatccccctgaccaagagcaccaacctgggcagcggcaccagcgtggtgaagggccccggcttcaccggcggcgacatcctgcgccgcaccagccccggccagatcagcaccctgcgcgtgaacatcaccgcccccctgagccagcgctaccgcgtccgcatccgctacgccagcaccaccaacctgcagttccacaccagcatcgacggccgccccatcaaccagggcaacttcagcgccaccatgagcagcggcagcaacctgcagagcggcagcttccgcaccgtgggcttcaccacccccttcaacttcagcaacggcagcagcgtgttcaccctgagcgcccacgtgttcaacagcggcaacgaggtgtacatcgaccgcatcgagttcgtgcccgccgaggtgaccttcgaggccgagtacgacctggagagggctcagaaggccgtgaacgagctgttcaccagcagcaaccagatcggcctgaagaccgacgtgaccgactaccacatcgaccaggtgagcaacctggtggagtgcttaagcgacgagttctgcctggacgagaagaaggagctgagcgagaaggtgaagcacgccaagcgcctgagcgacgagcgcaacctgctgcaggaccccaacttccgcggcatcaaccgccagctggaccgcggctggcgaggcagcaccgatatcaccatccagggcggcgacgacgtgttcaaggagaactacgtgaccctgctgggcaccttcgacgagtgctaccccacctacctgtaccagaagatcgacgagagcaagctgaaggcctacacccgctaccagctgcgcggctacatcgaggacagccaggacctggaaatctacctgatccgctacaacgcgaagcacgagaccgtgaacgtgcccggcaccggcagcctgtggcccctgagcgcccccagccccatcggcaagtgcactagcacatccaacacgcacgagatgacagatagagcagtgagcagaccatctcttactagtcaccacagccaccacttcagcctggacatcgacgtgggctgcaccgacctgaacgaggacctgggcgtgtgggtgatcttcaagatcaagacccaggacggccacgcccgcctgggcaatctagagttcctggaggagaagcccctggtgggcgaggccctggcccgcgtgaagcgtgctgagaagaagtggcgcgacaagcgcgagaagctggagtgggagaccaacatcgtgtacaaggaggccaaggagagcgtggacgccctgttcgtgaacagccagtacgaccgcctgcaggccgacaccaacatcgccatgatccacgccgccgacaagcgcgtgcacagcattcgcgaggcctacctgcccgagctgagcgtgatccccggtgtgaacgccgccatcttcgaggaactcgagggccgcatctaggagctctatgatcgttcaaacatttggcaataaagtttcttaagattgaatcctgttgccggtcttgcgatgattatcatataatttctgttgaattacgttaagcatgtaataattaacatgtaatgcatgacgttatttatgagatgggtttttatgattagagtcccgcaattatacatttaatacgcgatagaaaacaaaatatagcgcgcaaactaggataaattatcgcgcgcggtgtcatctatgttactagatc

SEQ ID NO: 22 - DNA, 5152 bp, Artificial Sequence
  24375 cry1Ab expression cassette
ctgcagtgcagcgtgacccggtcgtgcccctctctagagataatgagcattgcatgtctaagttataaaaaattaccacatattttttttgtcacacttgtttgaagtgcagtttatctatctttatacatatatttaaactttactctacgaataatataatctatagtactacaataatatcagtgttttagagaatcatataaatgaacagttagacatggtctaaaggacaattgagtattttgacaacaggactctacagttttatctttttagtgtgcatgtgttctcctttttttttgcaaatagcttcacctatataatacttcatccattttattagtacatccatttagggtttagggttaatggtttttatagactaatttttttagtacatctattttattctattttagcctctaaattaagaaaactaaaactctattttagtttttttatttaataatttagatataaaatagaataaaataaagtgactaaaaattaaacaaataccctttaagaaattaaaaaaactaaggaaacatttttcttgtttcgagtagataatgccagcctgttaaacgccgtcgacgagtctaacggacaccaaccagcgaaccagcagcgtcgcgtcgggccaagcgaagcagacggcacggcatctctgtcgctgcctctggacccctctcgagagttccgctccaccgttggacttgctccgctgtcggcatccagaaattgcgtggcggagcggcagacgtgagccggcacggcaggcggcctcctcctcctctcacggcaccggcagctacgggggattcctttcccaccgctccttcgctttcccttcctcgcccgccgtaataaatagacaccccctccacaccctctttccccaacctcgtgttgttcggagcgcacacacacacaaccagatctcccccaaatccacccgtcggcacctccgcttcctaggtacgccgctcgtcctccccccccccccctctctaccttctctagatcggcgttccggtccatagttagggcccggtagttctacttctgttcatgtttgtgttagatccgtgtttgtgttagatccgtgctgctagcgttcgtacacggatgcgacctgtacgtcagacacgttctgattgctaacttgccagtgtttctctttggggaatcctgggatggctctagccgttccgcagacgggatcgatttcatgattttttttgtttcgttgcatagggtttggtttgcccttttcctttatttcaatatatgccgtgcacttgtttgtcgggtcatcttttcatgcttttttttgtcttggttgtgatgatgtggtctggttgggcggtcgttctagatcggagtagaattctgtttcaaactacctggtggatttattaattttggatctgtatgtgtgtgccatacatattcatagttacgaattgaagatgatggatggaaatatcgatctaggataggtatacatgttgatgcgggttttactgatgcatatacagagatgctttttgttcgcttggttgtgatgatgtggtgtggttgggcggtcgttcattcgttctagatcggagtagaatactgtttcaaactacctggtgtatttattaattttggaactgtatgtgtgtgtcatacatcttcatagttacgagtttaagatggatggaaatatcgatctaggataggtatacatgttgatgtgggttttactgatgcatatacatgatggcatatgcagcatctattcatatgctctaaccttgagtacctatctattataataaacaagtatgttttataattattttgatcttgatatacttggatgatggcatatccagcagctatatgtggatttttttagccctgccttcatacgctatttatttgcttggtactgtttcttttgtcgatgctcaccctgttgtttggtgttacttctgcaggatcctctaagtagcagccatggacaacaaccccaacatcaacgagtgcatcccctacaactgcctgagcaaccccgaggtggaggtgctgggcggcgagcgcatcgagaccggctacacccccatcgacatcagcctgagcctgacccagttcctgctgagcgagttcgtgcccggcgccggcttcgtgctgggcctggtggacatcatctggggcatcttcggccccagccagtgggacgccttcctggtgcagatcgagcagttgataaaccaacgcatagaggaattcgcccgcaaccaggccatcagccgcctggagggcctgagcaacctgtaccaaatctacgccgagagcttccgcgagtgggaggccgaccccaccaaccccgccctgcgcgaggagatgcgcatccagttcaacgacatgaacagcgccctgaccaccgccatccccctgttcgccgtgcagaactaccaggtgcccctgctgagcgtgtacgtgcaggccgccaacctgcacctgagcgtgctgcgcgacgtcagcgtgttcggccagcgctggggcttcgacgccgccaccatcaacagccgctacaacgacctgacccgcctgatcggcaactacaccgaccacgccgtgcgctggtacaacaccggcctggagcgcgtgtgggggcccgacagccgcgactggatcaggtacaaccagttccgccgcgagctgaccctgaccgtgctggacatcgtgagcctgttccccaactacgacagccgcacctaccccatccgcaccgtgagccagctgacccgcgagatttacaccaaccccgtgctggagaacttcgacggcagcttccgcggcagcgcccagggcatcgagggcagcatccgcagcccccacctgatggacatcctgaacagcatcaccatctacaccgacgcccaccgcggcgagtactactggagcggccaccagatcatggccagccccgtcggcttcagcggccccgagttcaccttccccctgtacggcacgatgggcaacgctgcacctcagcagcgcatcgtggcacagctgggccagggagtgtaccgcaccctgagcagcaccctgtaccgtcgacctttcaacatcggcatcaacaaccagcagctgagcgtgctggacggcaccgagttcgcctacggcaccagcagcaacctgcccagcgccgtgtaccgcaagagcggcaccgtggacagcctggacgagatcccccctcagaacaacaacgtgccacctcgacagggcttcagccaccgtctgagccacgtgagcatgttccgcagtggcttcagcaacagcagcgtgagcatcatccgtgcacctatgttcagctggattcaccgcagtgccgagttcaacaacatcatccccagcagccagatcacccagatccccctgaccaagagcaccaacctgggcagcggcaccagcgtggtgaagggccccggcttcaccggcggcgacatcctgcgccgcaccagccccggccagatcagcaccctgcgcgtgaacatcaccgcccccctgagccagcgctaccgcgtccgcatccgctacgccagcaccaccaacctgcagttccacaccagcatcgacggccgccccatcaaccagggcaacttcagcgccaccatgagcagcggcagcaacctgcagagcggcagcttccgcaccgtgggcttcaccacccccttcaacttcagcaacggcagcagcgtgttcaccctgagcgcccacgtgttcaacagcggcaacgaggtgtacatcgaccgcatcgagttcgtgcccgccgaggtgaccttcgaggccgagtacgacctggagagggctcagaaggccgtgaacgagctgttcaccagcagcaaccagatcggcctgaagaccgacgtgaccgactaccacatcgaccaggtgagcaacctggtggagtgcttaagcgacgagttctgcctggacgagaagaaggagctgagcgagaaggtgaagcacgccaagcgcctgagcgacgagcgcaacctgctgcaggaccccaacttccgcggcatcaaccgccagctggaccgcggctggcgaggcagcaccgatatcaccatccagggcggcgacgacgtgttcaaggagaactacgtgaccctgctgggcaccttcgacgagtgctaccccacctacctgtaccagaagatcgacgagagcaagctgaaggcctacacccgctaccagctgcgcggctacatcgaggacagccaggacctggaaatctacctgatccgctacaacgcgaagcacgagaccgtgaacgtgcccggcaccggcagcctgtggcccctgagcgcccccagccccatcggcaagtgcactagcatctctgttgcctttttgattgaaccgtgccaacagcttgttggatttactagtcaccacagccaccacttcagcctggacatcgacgtgggctgcaccgacctgaacgaggacctgggcgtgtgggtgatcttcaagatcaagacccaggacggccacgcccgcctgggcaatctagagttcctggaggagaagcccctggtgggcgaggccctggcccgcgtgaagcgtgctgagaagaagtggcgcgacaagcgcgagaagctggagtgggagaccaacatcgtgtacaaggaggccaaggagagcgtggacgccctgttcgtgaacagccagtacgaccgcctgcaggccgacaccaacatcgccatgatccacgccgccgacaagcgcgtgcacagcattcgcgaggcctacctgcccgagctgagcgtgatccccggtgtgaacgccgccatcttcgaggaactcgagggccgcatctaggagctctatgatcgttcaaacatttggcaataaagtttcttaagattgaatcctgttgccggtcttgcgatgattatcatataatttctgttgaattacgttaagcatgtaataattaacatgtaatgcatgacgttatttatgagatgggtttttatgattagagtcccgcaattatacatttaatacgcgatagaaaacaaaatatagcgcgcaaactaggataaattatcgcgcgcggtgtcatctatgttactagatc

SEQ ID NO: 23 - DNA, 5155 bp, Artificial Sequence
  24376 cry1Ab expression cassette
ctgcagtgcagcgtgacccggtcgtgcccctctctagagataatgagcattgcatgtctaagttataaaaaattaccacatattttttttgtcacacttgtttgaagtgcagtttatctatctttatacatatatttaaactttactctacgaataatataatctatagtactacaataatatcagtgttttagagaatcatataaatgaacagttagacatggtctaaaggacaattgagtattttgacaacaggactctacagttttatctttttagtgtgcatgtgttctcctttttttttgcaaatagcttcacctatataatacttcatccattttattagtacatccatttagggtttagggttaatggtttttatagactaatttttttagtacatctattttattctattttagcctctaaattaagaaaactaaaactctattttagtttttttatttaataatttagatataaaatagaataaaataaagtgactaaaaattaaacaaataccctttaagaaattaaaaaaactaaggaaacatttttcttgtttcgagtagataatgccagcctgttaaacgccgtcgacgagtctaacggacaccaaccagcgaaccagcagcgtcgcgtcgggccaagcgaagcagacggcacggcatctctgtcgctgcctctggacccctctcgagagttccgctccaccgttggacttgctccgctgtcggcatccagaaattgcgtggcggagcggcagacgtgagccggcacggcaggcggcctcctcctcctctcacggcaccggcagctacgggggattcctttcccaccgctccttcgctttcccttcctcgcccgccgtaataaatagacaccccctccacaccctctttccccaacctcgtgttgttcggagcgcacacacacacaaccagatctcccccaaatccacccgtcggcacctccgcttcctaggtacgccgctcgtcctccccccccccccctctctaccttctctagatcggcgttccggtccatagttagggcccggtagttctacttctgttcatgtttgtgttagatccgtgtttgtgttagatccgtgctgctagcgttcgtacacggatgcgacctgtacgtcagacacgttctgattgctaacttgccagtgtttctctttggggaatcctgggatggctctagccgttccgcagacgggatcgatttcatgattttttttgtttcgttgcatagggtttggtttgcccttttcctttatttcaatatatgccgtgcacttgtttgtcgggtcatcttttcatgcttttttttgtcttggttgtgatgatgtggtctggttgggcggtcgttctagatcggagtagaattctgtttcaaactacctggtggatttattaattttggatctgtatgtgtgtgccatacatattcatagttacgaattgaagatgatggatggaaatatcgatctaggataggtatacatgttgatgcgggttttactgatgcatatacagagatgctttttgttcgcttggttgtgatgatgtggtgtggttgggcggtcgttcattcgttctagatcggagtagaatactgtttcaaactacctggtgtatttattaattttggaactgtatgtgtgtgtcatacatcttcatagttacgagtttaagatggatggaaatatcgatctaggataggtatacatgttgatgtgggttttactgatgcatatacatgatggcatatgcagcatctattcatatgctctaaccttgagtacctatctattataataaacaagtatgttttataattattttgatcttgatatacttggatgatggcatatccagcagctatatgtggatttttttagccctgccttcatacgctatttatttgcttggtactgtttcttttgtcgatgctcaccctgttgtttggtgttacttctgcaggatcctctaagtagcagccatggacaacaaccccaacatcaacgagtgcatcccctacaactgcctgagcaaccccgaggtggaggtgctgggcggcgagcgcatcgagaccggctacacccccatcgacatcagcctgagcctgacccagttcctgctgagcgagttcgtgcccggcgccggcttcgtgctgggcctggtggacatcatctggggcatcttcggccccagccagtgggacgccttcctggtgcagatcgagcagttgataaaccaacgcatagaggaattcgcccgcaaccaggccatcagccgcctggagggcctgagcaacctgtaccaaatctacgccgagagcttccgcgagtgggaggccgaccccaccaaccccgccctgcgcgaggagatgcgcatccagttcaacgacatgaacagcgccctgaccaccgccatccccctgttcgccgtgcagaactaccaggtgcccctgctgagcgtgtacgtgcaggccgccaacctgcacctgagcgtgctgcgcgacgtcagcgtgttcggccagcgctggggcttcgacgccgccaccatcaacagccgctacaacgacctgacccgcctgatcggcaactacaccgaccacgccgtgcgctggtacaacaccggcctggagcgcgtgtgggggcccgacagccgcgactggatcaggtacaaccagttccgccgcgagctgaccctgaccgtgctggacatcgtgagcctgttccccaactacgacagccgcacctaccccatccgcaccgtgagccagctgacccgcgagatttacaccaaccccgtgctggagaacttcgacggcagcttccgcggcagcgcccagggcatcgagggcagcatccgcagcccccacctgatggacatcctgaacagcatcaccatctacaccgacgcccaccgcggcgagtactactggagcggccaccagatcatggccagccccgtcggcttcagcggccccgagttcaccttccccctgtacggcacgatgggcaacgctgcacctcagcagcgcatcgtggcacagctgggccagggagtgtaccgcaccctgagcagcaccctgtaccgtcgacctttcaacatcggcatcaacaaccagcagctgagcgtgctggacggcaccgagttcgcctacggcaccagcagcaacctgcccagcgccgtgtaccgcaagagcggcaccgtggacagcctggacgagatcccccctcagaacaacaacgtgccacctcgacagggcttcagccaccgtctgagccacgtgagcatgttccgcagtggcttcagcaacagcagcgtgagcatcatccgtgcacctatgttcagctggattcaccgcagtgccgagttcaacaacatcatccccagcagccagatcacccagatccccctgaccaagagcaccaacctgggcagcggcaccagcgtggtgaagggccccggcttcaccggcggcgacatcctgcgccgcaccagccccggccagatcagcaccctgcgcgtgaacatcaccgcccccctgagccagcgctaccgcgtccgcatccgctacgccagcaccaccaacctgcagttccacaccagcatcgacggccgccccatcaaccagggcaacttcagcgccaccatgagcagcggcagcaacctgcagagcggcagcttccgcaccgtgggcttcaccacccccttcaacttcagcaacggcagcagcgtgttcaccctgagcgcccacgtgttcaacagcggcaacgaggtgtacatcgaccgcatcgagttcgtgcccgccgaggtgaccttcgaggccgagtacgacctggagagggctcagaaggccgtgaacgagctgttcaccagcagcaaccagatcggcctgaagaccgacgtgaccgactaccacatcgaccaggtgagcaacctggtggagtgcttaagcgacgagttctgcctggacgagaagaaggagctgagcgagaaggtgaagcacgccaagcgcctgagcgacgagcgcaacctgctgcaggaccccaacttccgcggcatcaaccgccagctggaccgcggctggcgaggcagcaccgatatcaccatccagggcggcgacgacgtgttcaaggagaactacgtgaccctgctgggcaccttcgacgagtgctaccccacctacctgtaccagaagatcgacgagagcaagctgaaggcctacacccgctaccagctgcgcggctacatcgaggacagccaggacctggaaatctacctgatccgctacaacgcgaagcacgagaccgtgaacgtgcccggcaccggcagcctgtggcccctgagcgcccccagccccatcggcaagtgcactagcgacgaccccaaaggacaggtttcccacagctttattgaacaattgtttgcatctagtcaccacagccaccacttcagcctggacatcgacgtgggctgcaccgacctgaacgaggacctgggcgtgtgggtgatcttcaagatcaagacccaggacggccacgcccgcctgggcaatctagagttcctggaggagaagcccctggtgggcgaggccctggcccgcgtgaagcgtgctgagaagaagtggcgcgacaagcgcgagaagctggagtgggagaccaacatcgtgtacaaggaggccaaggagagcgtggacgccctgttcgtgaacagccagtacgaccgcctgcaggccgacaccaacatcgccatgatccacgccgccgacaagcgcgtgcacagcattcgcgaggcctacctgcccgagctgagcgtgatccccggtgtgaacgccgccatcttcgaggaactcgagggccgcatctaggagctctatgatcgttcaaacatttggcaataaagtttcttaagattgaatcctgttgccggtcttgcgatgattatcatataatttctgttgaattacgttaagcatgtaataattaacatgtaatgcatgacgttatttatgagatgggtttttatgattagagtcccgcaattatacatttaatacgcgatagaaaacaaaatatagcgcgcaaactaggataaattatcgcgcgcggtgtcatctatgttactagatc

SEQ ID NO: 24 - DNA, 5152 bp, Artificial Sequence
  24377 cry1Ab expression cassette
ctgcagtgcagcgtgacccggtcgtgcccctctctagagataatgagcattgcatgtctaagttataaaaaattaccacatattttttttgtcacacttgtttgaagtgcagtttatctatctttatacatatatttaaactttactctacgaataatataatctatagtactacaataatatcagtgttttagagaatcatataaatgaacagttagacatggtctaaaggacaattgagtattttgacaacaggactctacagttttatctttttagtgtgcatgtgttctcctttttttttgcaaatagcttcacctatataatacttcatccattttattagtacatccatttagggtttagggttaatggtttttatagactaatttttttagtacatctattttattctattttagcctctaaattaagaaaactaaaactctattttagtttttttatttaataatttagatataaaatagaataaaataaagtgactaaaaattaaacaaataccctttaagaaattaaaaaaactaaggaaacatttttcttgtttcgagtagataatgccagcctgttaaacgccgtcgacgagtctaacggacaccaaccagcgaaccagcagcgtcgcgtcgggccaagcgaagcagacggcacggcatctctgtcgctgcctctggacccctctcgagagttccgctccaccgttggacttgctccgctgtcggcatccagaaattgcgtggcggagcggcagacgtgagccggcacggcaggcggcctcctcctcctctcacggcaccggcagctacgggggattcctttcccaccgctccttcgctttcccttcctcgcccgccgtaataaatagacaccccctccacaccctctttccccaacctcgtgttgttcggagcgcacacacacacaaccagatctcccccaaatccacccgtcggcacctccgcttcctaggtacgccgctcgtcctccccccccccccctctctaccttctctagatcggcgttccggtccatagttagggcccggtagttctacttctgttcatgtttgtgttagatccgtgtttgtgttagatccgtgctgctagcgttcgtacacggatgcgacctgtacgtcagacacgttctgattgctaacttgccagtgtttctctttggggaatcctgggatggctctagccgttccgcagacgggatcgatttcatgattttttttgtttcgttgcatagggtttggtttgcccttttcctttatttcaatatatgccgtgcacttgtttgtcgggtcatcttttcatgcttttttttgtcttggttgtgatgatgtggtctggttgggcggtcgttctagatcggagtagaattctgtttcaaactacctggtggatttattaattttggatctgtatgtgtgtgccatacatattcatagttacgaattgaagatgatggatggaaatatcgatctaggataggtatacatgttgatgcgggttttactgatgcatatacagagatgctttttgttcgcttggttgtgatgatgtggtgtggttgggcggtcgttcattcgttctagatcggagtagaatactgtttcaaactacctggtgtatttattaattttggaactgtatgtgtgtgtcatacatcttcatagttacgagtttaagatggatggaaatatcgatctaggataggtatacatgttgatgtgggttttactgatgcatatacatgatggcatatgcagcatctattcatatgctctaaccttgagtacctatctattataataaacaagtatgttttataattattttgatcttgatatacttggatgatggcatatccagcagctatatgtggatttttttagccctgccttcatacgctatttatttgcttggtactgtttcttttgtcgatgctcaccctgttgtttggtgttacttctgcaggatcctctaagtagcagccatggacaacaaccccaacatcaacgagtgcatcccctacaactgcctgagcaaccccgaggtggaggtgctgggcggcgagcgcatcgagaccggctacacccccatcgacatcagcctgagcctgacccagttcctgctgagcgagttcgtgcccggcgccggcttcgtgctgggcctggtggacatcatctggggcatcttcggccccagccagtgggacgccttcctggtgcagatcgagcagttgataaaccaacgcatagaggaattcgcccgcaaccaggccatcagccgcctggagggcctgagcaacctgtaccaaatctacgccgagagcttccgcgagtgggaggccgaccccaccaaccccgccctgcgcgaggagatgcgcatccagttcaacgacatgaacagcgccctgaccaccgccatccccctgttcgccgtgcagaactaccaggtgcccctgctgagcgtgtacgtgcaggccgccaacctgcacctgagcgtgctgcgcgacgtcagcgtgttcggccagcgctggggcttcgacgccgccaccatcaacagccgctacaacgacctgacccgcctgatcggcaactacaccgaccacgccgtgcgctggtacaacaccggcctggagcgcgtgtgggggcccgacagccgcgactggatcaggtacaaccagttccgccgcgagctgaccctgaccgtgctggacatcgtgagcctgttccccaactacgacagccgcacctaccccatccgcaccgtgagccagctgacccgcgagatttacaccaaccccgtgctggagaacttcgacggcagcttccgcggcagcgcccagggcatcgagggcagcatccgcagcccccacctgatggacatcctgaacagcatcaccatctacaccgacgcccaccgcggcgagtactactggagcggccaccagatcatggccagccccgtcggcttcagcggccccgagttcaccttccccctgtacggcacgatgggcaacgctgcacctcagcagcgcatcgtggcacagctgggccagggagtgtaccgcaccctgagcagcaccctgtaccgtcgacctttcaacatcggcatcaacaaccagcagctgagcgtgctggacggcaccgagttcgcctacggcaccagcagcaacctgcccagcgccgtgtaccgcaagagcggcaccgtggacagcctggacgagatcccccctcagaacaacaacgtgccacctcgacagggcttcagccaccgtctgagccacgtgagcatgttccgcagtggcttcagcaacagcagcgtgagcatcatccgtgcacctatgttcagctggattcaccgcagtgccgagttcaacaacatcatccccagcagccagatcacccagatccccctgaccaagagcaccaacctgggcagcggcaccagcgtggtgaagggccccggcttcaccggcggcgacatcctgcgccgcaccagccccggccagatcagcaccctgcgcgtgaacatcaccgcccccctgagccagcgctaccgcgtccgcatccgctacgccagcaccaccaacctgcagttccacaccagcatcgacggccgccccatcaaccagggcaacttcagcgccaccatgagcagcggcagcaacctgcagagcggcagcttccgcaccgtgggcttcaccacccccttcaacttcagcaacggcagcagcgtgttcaccctgagcgcccacgtgttcaacagcggcaacgaggtgtacatcgaccgcatcgagttcgtgcccgccgaggtgaccttcgaggccgagtacgacctggagagggctcagaaggccgtgaacgagctgttcaccagcagcaaccagatcggcctgaagaccgacgtgaccgactaccacatcgaccaggtgagcaacctggtggagtgcttaagcgacgagttctgcctggacgagaagaaggagctgagcgagaaggtgaagcacgccaagcgcctgagcgacgagcgcaacctgctgcaggaccccaacttccgcggcatcaaccgccagctggaccgcggctggcgaggcagcaccgatatcaccatccagggcggcgacgacgtgttcaaggagaactacgtgaccctgctgggcaccttcgacgagtgctaccccacctacctgtaccagaagatcgacgagagcaagctgaaggcctacacccgctaccagctgcgcggctacatcgaggacagccaggacctggaaatctacctgatccgctacaacgcgaagcacgagaccgtgaacgtgcccggcaccggcagcctgtggcccctgagcgcccccagccccatcggcaagtgcactagtcctttctctctctttctttctctctgctttattgaacttctcaaagttactagtcaccacagccaccacttcagcctggacatcgacgtgggctgcaccgacctgaacgaggacctgggcgtgtgggtgatcttcaagatcaagacccaggacggccacgcccgcctgggcaatctagagttcctggaggagaagcccctggtgggcgaggccctggcccgcgtgaagcgtgctgagaagaagtggcgcgacaagcgcgagaagctggagtgggagaccaacatcgtgtacaaggaggccaaggagagcgtggacgccctgttcgtgaacagccagtacgaccgcctgcaggccgacaccaacatcgccatgatccacgccgccgacaagcgcgtgcacagcattcgcgaggcctacctgcccgagctgagcgtgatccccggtgtgaacgccgccatcttcgaggaactcgagggccgcatctaggagctctatgatcgttcaaacatttggcaataaagtttcttaagattgaatcctgttgccggtcttgcgatgattatcatataatttctgttgaattacgttaagcatgtaataattaacatgtaatgcatgacgttatttatgagatgggtttttatgattagagtcccgcaattatacatttaatacgcgatagaaaacaaaatatagcgcgcaaactaggataaattatcgcgcgcggtgtcatctatgttactagatc

SEQ ID NO: 25 - DNA, 5155 bp, Artificial Sequence
  24379 cry1Ab expression cassette
ctgcagtgcagcgtgacccggtcgtgcccctctctagagataatgagcattgcatgtctaagttataaaaaattaccacatattttttttgtcacacttgtttgaagtgcagtttatctatctttatacatatatttaaactttactctacgaataatataatctatagtactacaataatatcagtgttttagagaatcatataaatgaacagttagacatggtctaaaggacaattgagtattttgacaacaggactctacagttttatctttttagtgtgcatgtgttctcctttttttttgcaaatagcttcacctatataatacttcatccattttattagtacatccatttagggtttagggttaatggtttttatagactaatttttttagtacatctattttattctattttagcctctaaattaagaaaactaaaactctattttagtttttttatttaataatttagatataaaatagaataaaataaagtgactaaaaattaaacaaataccctttaagaaattaaaaaaactaaggaaacatttttcttgtttcgagtagataatgccagcctgttaaacgccgtcgacgagtctaacggacaccaaccagcgaaccagcagcgtcgcgtcgggccaagcgaagcagacggcacggcatctctgtcgctgcctctggacccctctcgagagttccgctccaccgttggacttgctccgctgtcggcatccagaaattgcgtggcggagcggcagacgtgagccggcacggcaggcggcctcctcctcctctcacggcaccggcagctacgggggattcctttcccaccgctccttcgctttcccttcctcgcccgccgtaataaatagacaccccctccacaccctctttccccaacctcgtgttgttcggagcgcacacacacacaaccagatctcccccaaatccacccgtcggcacctccgcttcctagcatccttttcattgataagaagagcaccgttcactccaactgcaaacttgtggctaggtacgccgctcgtcctccccccccccccctctctaccttctctagatcggcgttccggtccatagttagggcccggtagttctacttctgttcatgtttgtgttagatccgtgtttgtgttagatccgtgctgctagcgttcgtacacggatgcgacctgtacgtcagacacgttctgattgctaacttgccagtgtttctctttggggaatcctgggatggctctagccgttccgcagacgggatcgatttcatgattttttttgtttcgttgcatagggtttggtttgcccttttcctttatttcaatatatgccgtgcacttgtttgtcgggtcatcttttcatgcttttttttgtcttggttgtgatgatgtggtctggttgggcggtcgttctagatcggagtagaattctgtttcaaactacctggtggatttattaattttggatctgtatgtgtgtgccatacatattcatagttacgaattgaagatgatggatggaaatatcgatctaggataggtatacatgttgatgcgggttttactgatgcatatacagagatgctttttgttcgcttggttgtgatgatgtggtgtggttgggcggtcgttcattcgttctagatcggagtagaatactgtttcaaactacctggtgtatttattaattttggaactgtatgtgtgtgtcatacatcttcatagttacgagtttaagatggatggaaatatcgatctaggataggtatacatgttgatgtgggttttactgatgcatatacatgatggcatatgcagcatctattcatatgctctaaccttgagtacctatctattataataaacaagtatgttttataattattttgatcttgatatacttggatgatggcatatccagcagctatatgtggatttttttagccctgccttcatacgctatttatttgcttggtactgtttcttttgtcgatgctcaccctgttgtttggtgttacttctgcaggatcctctaagtagcagccatggacaacaaccccaacatcaacgagtgcatcccctacaactgcctgagcaaccccgaggtggaggtgctgggcggcgagcgcatcgagaccggctacacccccatcgacatcagcctgagcctgacccagttcctgctgagcgagttcgtgcccggcgccggcttcgtgctgggcctggtggacatcatctggggcatcttcggccccagccagtgggacgccttcctggtgcagatcgagcagttgataaaccaacgcatagaggaattcgcccgcaaccaggccatcagccgcctggagggcctgagcaacctgtaccaaatctacgccgagagcttccgcgagtgggaggccgaccccaccaaccccgccctgcgcgaggagatgcgcatccagttcaacgacatgaacagcgccctgaccaccgccatccccctgttcgccgtgcagaactaccaggtgcccctgctgagcgtgtacgtgcaggccgccaacctgcacctgagcgtgctgcgcgacgtcagcgtgttcggccagcgctggggcttcgacgccgccaccatcaacagccgctacaacgacctgacccgcctgatcggcaactacaccgaccacgccgtgcgctggtacaacaccggcctggagcgcgtgtgggggcccgacagccgcgactggatcaggtacaaccagttccgccgcgagctgaccctgaccgtgctggacatcgtgagcctgttccccaactacgacagccgcacctaccccatccgcaccgtgagccagctgacccgcgagatttacaccaaccccgtgctggagaacttcgacggcagcttccgcggcagcgcccagggcatcgagggcagcatccgcagcccccacctgatggacatcctgaacagcatcaccatctacaccgacgcccaccgcggcgagtactactggagcggccaccagatcatggccagccccgtcggcttcagcggccccgagttcaccttccccctgtacggcacgatgggcaacgctgcacctcagcagcgcatcgtggcacagctgggccagggagtgtaccgcaccctgagcagcaccctgtaccgtcgacctttcaacatcggcatcaacaaccagcagctgagcgtgctggacggcaccgagttcgcctacggcaccagcagcaacctgcccagcgccgtgtaccgcaagagcggcaccgtggacagcctggacgagatcccccctcagaacaacaacgtgccacctcgacagggcttcagccaccgtctgagccacgtgagcatgttccgcagtggcttcagcaacagcagcgtgagcatcatccgtgcacctatgttcagctggattcaccgcagtgccgagttcaacaacatcatccccagcagccagatcacccagatccccctgaccaagagcaccaacctgggcagcggcaccagcgtggtgaagggccccggcttcaccggcggcgacatcctgcgccgcaccagccccggccagatcagcaccctgcgcgtgaacatcaccgcccccctgagccagcgctaccgcgtccgcatccgctacgccagcaccaccaacctgcagttccacaccagcatcgacggccgccccatcaaccagggcaacttcagcgccaccatgagcagcggcagcaacctgcagagcggcagcttccgcaccgtgggcttcaccacccccttcaacttcagcaacggcagcagcgtgttcaccctgagcgcccacgtgttcaacagcggcaacgaggtgtacatcgaccgcatcgagttcgtgcccgccgaggtgaccttcgaggccgagtacgacctggagagggctcagaaggccgtgaacgagctgttcaccagcagcaaccagatcggcctgaagaccgacgtgaccgactaccacatcgaccaggtgagcaacctggtggagtgcttaagcgacgagttctgcctggacgagaagaaggagctgagcgagaaggtgaagcacgccaagcgcctgagcgacgagcgcaacctgctgcaggaccccaacttccgcggcatcaaccgccagctggaccgcggctggcgaggcagcaccgatatcaccatccagggcggcgacgacgtgttcaaggagaactacgtgaccctgctgggcaccttcgacgagtgctaccccacctacctgtaccagaagatcgacgagagcaagctgaaggcctacacccgctaccagctgcgcggctacatcgaggacagccaggacctggaaatctacctgatccgctacaacgcgaagcacgagaccgtgaacgtgcccggcaccggcagcctgtggcccctgagcgcccccagccccatcggcaagtgcactagtcaccacagccaccacttcagcctggacatcgacgtgggctgcaccgacctgaacgaggacctgggcgtgtgggtgatcttcaagatcaagacccaggacggccacgcccgcctgggcaatctagagttcctggaggagaagcccctggtgggcgaggccctggcccgcgtgaagcgtgctgagaagaagtggcgcgacaagcgcgagaagctggagtgggagaccaacatcgtgtacaaggaggccaaggagagcgtggacgccctgttcgtgaacagccagtacgaccgcctgcaggccgacaccaacatcgccatgatccacgccgccgacaagcgcgtgcacagcattcgcgaggcctacctgcccgagctgagcgtgatccccggtgtgaacgccgccatcttcgaggaactcgagggccgcatctaggagctctatgatcgttcaaacatttggcaataaagtttcttaagattgaatcctgttgccggtcttgcgatgattatcatataatttctgttgaattacgttaagcatgtaataattaacatgtaatgcatgacgttatttatgagatgggtttttatgattagagtcccgcaattatacatttaatacgcgatagaaaacaaaatatagcgcgcaaactaggataaattatcgcgcgcggtgtcatctatgttactagatc

SEQ ID NO: 26 - DNA, 5154 bp, Artificial Sequence
  24380 cry1Ab expression cassette
ctgcagtgcagcgtgacccggtcgtgcccctctctagagataatgagcattgcatgtctaagttataaaaaattaccacatattttttttgtcacacttgtttgaagtgcagtttatctatctttatacatatatttaaactttactctacgaataatataatctatagtactacaataatatcagtgttttagagaatcatataaatgaacagttagacatggtctaaaggacaattgagtattttgacaacaggactctacagttttatctttttagtgtgcatgtgttctcctttttttttgcaaatagcttcacctatataatacttcatccattttattagtacatccatttagggtttagggttaatggtttttatagactaatttttttagtacatctattttattctattttagcctctaaattaagaaaactaaaactctattttagtttttttatttaataatttagatataaaatagaataaaataaagtgactaaaaattaaacaaataccctttaagaaattaaaaaaactaaggaaacatttttcttgtttcgagtagataatgccagcctgttaaacgccgtcgacgagtctaacggacaccaaccagcgaaccagcagcgtcgcgtcgggccaagcgaagcagacggcacggcatctctgtcgctgcctctggacccctctcgagagttccgctccaccgttggacttgctccgctgtcggcatccagaaattgcgtggcggagcggcagacgtgagccggcacggcaggcggcctcctcctcctctcacggcaccggcagctacgggggattcctttcccaccgctccttcgctttcccttcctcgcccgccgtaataaatagacaccccctccacaccctctttccccaacctcgtgttgttcggagcgcacacacacacaaccagatctcccccaaatccacccgtcggcacctccgcttcctagacatccaacacgcacgagatgacagatagagcagtgagctgaccatctcttactaggtacgccgctcgtcctccccccccccccctctctaccttctctagatcggcgttccggtccatagttagggcccggtagttctacttctgttcatgtttgtgttagatccgtgtttgtgttagatccgtgctgctagcgttcgtacacggatgcgacctgtacgtcagacacgttctgattgctaacttgccagtgtttctctttggggaatcctgggatggctctagccgttccgcagacgggatcgatttcatgattttttttgtttcgttgcatagggtttggtttgcccttttcctttatttcaatatatgccgtgcacttgtttgtcgggtcatcttttcatgcttttttttgtcttggttgtgatgatgtggtctggttgggcggtcgttctagatcggagtagaattctgtttcaaactacctggtggatttattaattttggatctgtatgtgtgtgccatacatattcatagttacgaattgaagatgatggatggaaatatcgatctaggataggtatacatgttgatgcgggttttactgatgcatatacagagatgctttttgttcgcttggttgtgatgatgtggtgtggttgggcggtcgttcattcgttctagatcggagtagaatactgtttcaaactacctggtgtatttattaattttggaactgtatgtgtgtgtcatacatcttcatagttacgagtttaagatggatggaaatatcgatctaggataggtatacatgttgatgtgggttttactgatgcatatacatgatggcatatgcagcatctattcatatgctctaaccttgagtacctatctattataataaacaagtatgttttataattattttgatcttgatatacttggatgatggcatatccagcagctatatgtggatttttttagccctgccttcatacgctatttatttgcttggtactgtttcttttgtcgatgctcaccctgttgtttggtgttacttctgcaggatcctctaagtagcagccatggacaacaaccccaacatcaacgagtgcatcccctacaactgcctgagcaaccccgaggtggaggtgctgggcggcgagcgcatcgagaccggctacacccccatcgacatcagcctgagcctgacccagttcctgctgagcgagttcgtgcccggcgccggcttcgtgctgggcctggtggacatcatctggggcatcttcggccccagccagtgggacgccttcctggtgcagatcgagcagttgataaaccaacgcatagaggaattcgcccgcaaccaggccatcagccgcctggagggcctgagcaacctgtaccaaatctacgccgagagcttccgcgagtgggaggccgaccccaccaaccccgccctgcgcgaggagatgcgcatccagttcaacgacatgaacagcgccctgaccaccgccatccccctgttcgccgtgcagaactaccaggtgcccctgctgagcgtgtacgtgcaggccgccaacctgcacctgagcgtgctgcgcgacgtcagcgtgttcggccagcgctggggcttcgacgccgccaccatcaacagccgctacaacgacctgacccgcctgatcggcaactacaccgaccacgccgtgcgctggtacaacaccggcctggagcgcgtgtgggggcccgacagccgcgactggatcaggtacaaccagttccgccgcgagctgaccctgaccgtgctggacatcgtgagcctgttccccaactacgacagccgcacctaccccatccgcaccgtgagccagctgacccgcgagatttacaccaaccccgtgctggagaacttcgacggcagcttccgcggcagcgcccagggcatcgagggcagcatccgcagcccccacctgatggacatcctgaacagcatcaccatctacaccgacgcccaccgcggcgagtactactggagcggccaccagatcatggccagccccgtcggcttcagcggccccgagttcaccttccccctgtacggcacgatgggcaacgctgcacctcagcagcgcatcgtggcacagctgggccagggagtgtaccgcaccctgagcagcaccctgtaccgtcgacctttcaacatcggcatcaacaaccagcagctgagcgtgctggacggcaccgagttcgcctacggcaccagcagcaacctgcccagcgccgtgtaccgcaagagcggcaccgtggacagcctggacgagatcccccctcagaacaacaacgtgccacctcgacagggcttcagccaccgtctgagccacgtgagcatgttccgcagtggcttcagcaacagcagcgtgagcatcatccgtgcacctatgttcagctggattcaccgcagtgccgagttcaacaacatcatccccagcagccagatcacccagatccccctgaccaagagcaccaacctgggcagcggcaccagcgtggtgaagggccccggcttcaccggcggcgacatcctgcgccgcaccagccccggccagatcagcaccctgcgcgtgaacatcaccgcccccctgagccagcgctaccgcgtccgcatccgctacgccagcaccaccaacctgcagttccacaccagcatcgacggccgccccatcaaccagggcaacttcagcgccaccatgagcagcggcagcaacctgcagagcggcagcttccgcaccgtgggcttcaccacccccttcaacttcagcaacggcagcagcgtgttcaccctgagcgcccacgtgttcaacagcggcaacgaggtgtacatcgaccgcatcgagttcgtgcccgccgaggtgaccttcgaggccgagtacgacctggagagggctcagaaggccgtgaacgagctgttcaccagcagcaaccagatcggcctgaagaccgacgtgaccgactaccacatcgaccaggtgagcaacctggtggagtgcttaagcgacgagttctgcctggacgagaagaaggagctgagcgagaaggtgaagcacgccaagcgcctgagcgacgagcgcaacctgctgcaggaccccaacttccgcggcatcaaccgccagctggaccgcggctggcgaggcagcaccgatatcaccatccagggcggcgacgacgtgttcaaggagaactacgtgaccctgctgggcaccttcgacgagtgctaccccacctacctgtaccagaagatcgacgagagcaagctgaaggcctacacccgctaccagctgcgcggctacatcgaggacagccaggacctggaaatctacctgatccgctacaacgcgaagcacgagaccgtgaacgtgcccggcaccggcagcctgtggcccctgagcgcccccagccccatcggcaagtgcactagtcaccacagccaccacttcagcctggacatcgacgtgggctgcaccgacctgaacgaggacctgggcgtgtgggtgatcttcaagatcaagacccaggacggccacgcccgcctgggcaatctagagttcctggaggagaagcccctggtgggcgaggccctggcccgcgtgaagcgtgctgagaagaagtggcgcgacaagcgcgagaagctggagtgggagaccaacatcgtgtacaaggaggccaaggagagcgtggacgccctgttcgtgaacagccagtacgaccgcctgcaggccgacaccaacatcgccatgatccacgccgccgacaagcgcgtgcacagcattcgcgaggcctacctgcccgagctgagcgtgatccccggtgtgaacgccgccatcttcgaggaactcgagggccgcatctaggagctctatgatcgttcaaacatttggcaataaagtttcttaagattgaatcctgttgccggtcttgcgatgattatcatataatttctgttgaattacgttaagcatgtaataattaacatgtaatgcatgacgttatttatgagatgggtttttatgattagagtcccgcaattatacatttaatacgcgatagaaaacaaaatatagcgcgcaaactaggataaattatcgcgcgcggtgtcatctatgttactagatc

SEQ ID NO: 27 - DNA, 5152 bp, Artificial Sequence
  24381 cry1Ab exprewssion cassette
ctgcagtgcagcgtgacccggtcgtgcccctctctagagataatgagcattgcatgtctaagttataaaaaattaccacatattttttttgtcacacttgtttgaagtgcagtttatctatctttatacatatatttaaactttactctacgaataatataatctatagtactacaataatatcagtgttttagagaatcatataaatgaacagttagacatggtctaaaggacaattgagtattttgacaacaggactctacagttttatctttttagtgtgcatgtgttctcctttttttttgcaaatagcttcacctatataatacttcatccattttattagtacatccatttagggtttagggttaatggtttttatagactaatttttttagtacatctattttattctattttagcctctaaattaagaaaactaaaactctattttagtttttttatttaataatttagatataaaatagaataaaataaagtgactaaaaattaaacaaataccctttaagaaattaaaaaaactaaggaaacatttttcttgtttcgagtagataatgccagcctgttaaacgccgtcgacgagtctaacggacaccaaccagcgaaccagcagcgtcgcgtcgggccaagcgaagcagacggcacggcatctctgtcgctgcctctggacccctctcgagagttccgctccaccgttggacttgctccgctgtcggcatccagaaattgcgtggcggagcggcagacgtgagccggcacggcaggcggcctcctcctcctctcacggcaccggcagctacgggggattcctttcccaccgctccttcgctttcccttcctcgcccgccgtaataaatagacaccccctccacaccctctttccccaacctcgtgttgttcggagcgcacacacacacaaccagatctcccccaaatccacccgtcggcacctccgcttcctagcatctctgttgcctttttgattgaaccgtgccaacagcttgttggatttactaggtacgccgctcgtcctccccccccccccctctctaccttctctagatcggcgttccggtccatagttagggcccggtagttctacttctgttcatgtttgtgttagatccgtgtttgtgttagatccgtgctgctagcgttcgtacacggatgcgacctgtacgtcagacacgttctgattgctaacttgccagtgtttctctttggggaatcctgggatggctctagccgttccgcagacgggatcgatttcatgattttttttgtttcgttgcatagggtttggtttgcccttttcctttatttcaatatatgccgtgcacttgtttgtcgggtcatcttttcatgcttttttttgtcttggttgtgatgatgtggtctggttgggcggtcgttctagatcggagtagaattctgtttcaaactacctggtggatttattaattttggatctgtatgtgtgtgccatacatattcatagttacgaattgaagatgatggatggaaatatcgatctaggataggtatacatgttgatgcgggttttactgatgcatatacagagatgctttttgttcgcttggttgtgatgatgtggtgtggttgggcggtcgttcattcgttctagatcggagtagaatactgtttcaaactacctggtgtatttattaattttggaactgtatgtgtgtgtcatacatcttcatagttacgagtttaagatggatggaaatatcgatctaggataggtatacatgttgatgtgggttttactgatgcatatacatgatggcatatgcagcatctattcatatgctctaaccttgagtacctatctattataataaacaagtatgttttataattattttgatcttgatatacttggatgatggcatatccagcagctatatgtggatttttttagccctgccttcatacgctatttatttgcttggtactgtttcttttgtcgatgctcaccctgttgtttggtgttacttctgcaggatcctctaagtagcagccatggacaacaaccccaacatcaacgagtgcatcccctacaactgcctgagcaaccccgaggtggaggtgctgggcggcgagcgcatcgagaccggctacacccccatcgacatcagcctgagcctgacccagttcctgctgagcgagttcgtgcccggcgccggcttcgtgctgggcctggtggacatcatctggggcatcttcggccccagccagtgggacgccttcctggtgcagatcgagcagttgataaaccaacgcatagaggaattcgcccgcaaccaggccatcagccgcctggagggcctgagcaacctgtaccaaatctacgccgagagcttccgcgagtgggaggccgaccccaccaaccccgccctgcgcgaggagatgcgcatccagttcaacgacatgaacagcgccctgaccaccgccatccccctgttcgccgtgcagaactaccaggtgcccctgctgagcgtgtacgtgcaggccgccaacctgcacctgagcgtgctgcgcgacgtcagcgtgttcggccagcgctggggcttcgacgccgccaccatcaacagccgctacaacgacctgacccgcctgatcggcaactacaccgaccacgccgtgcgctggtacaacaccggcctggagcgcgtgtgggggcccgacagccgcgactggatcaggtacaaccagttccgccgcgagctgaccctgaccgtgctggacatcgtgagcctgttccccaactacgacagccgcacctaccccatccgcaccgtgagccagctgacccgcgagatttacaccaaccccgtgctggagaacttcgacggcagcttccgcggcagcgcccagggcatcgagggcagcatccgcagcccccacctgatggacatcctgaacagcatcaccatctacaccgacgcccaccgcggcgagtactactggagcggccaccagatcatggccagccccgtcggcttcagcggccccgagttcaccttccccctgtacggcacgatgggcaacgctgcacctcagcagcgcatcgtggcacagctgggccagggagtgtaccgcaccctgagcagcaccctgtaccgtcgacctttcaacatcggcatcaacaaccagcagctgagcgtgctggacggcaccgagttcgcctacggcaccagcagcaacctgcccagcgccgtgtaccgcaagagcggcaccgtggacagcctggacgagatcccccctcagaacaacaacgtgccacctcgacagggcttcagccaccgtctgagccacgtgagcatgttccgcagtggcttcagcaacagcagcgtgagcatcatccgtgcacctatgttcagctggattcaccgcagtgccgagttcaacaacatcatccccagcagccagatcacccagatccccctgaccaagagcaccaacctgggcagcggcaccagcgtggtgaagggccccggcttcaccggcggcgacatcctgcgccgcaccagccccggccagatcagcaccctgcgcgtgaacatcaccgcccccctgagccagcgctaccgcgtccgcatccgctacgccagcaccaccaacctgcagttccacaccagcatcgacggccgccccatcaaccagggcaacttcagcgccaccatgagcagcggcagcaacctgcagagcggcagcttccgcaccgtgggcttcaccacccccttcaacttcagcaacggcagcagcgtgttcaccctgagcgcccacgtgttcaacagcggcaacgaggtgtacatcgaccgcatcgagttcgtgcccgccgaggtgaccttcgaggccgagtacgacctggagagggctcagaaggccgtgaacgagctgttcaccagcagcaaccagatcggcctgaagaccgacgtgaccgactaccacatcgaccaggtgagcaacctggtggagtgcttaagcgacgagttctgcctggacgagaagaaggagctgagcgagaaggtgaagcacgccaagcgcctgagcgacgagcgcaacctgctgcaggaccccaacttccgcggcatcaaccgccagctggaccgcggctggcgaggcagcaccgatatcaccatccagggcggcgacgacgtgttcaaggagaactacgtgaccctgctgggcaccttcgacgagtgctaccccacctacctgtaccagaagatcgacgagagcaagctgaaggcctacacccgctaccagctgcgcggctacatcgaggacagccaggacctggaaatctacctgatccgctacaacgcgaagcacgagaccgtgaacgtgcccggcaccggcagcctgtggcccctgagcgcccccagccccatcggcaagtgcactagtcaccacagccaccacttcagcctggacatcgacgtgggctgcaccgacctgaacgaggacctgggcgtgtgggtgatcttcaagatcaagacccaggacggccacgcccgcctgggcaatctagagttcctggaggagaagcccctggtgggcgaggccctggcccgcgtgaagcgtgctgagaagaagtggcgcgacaagcgcgagaagctggagtgggagaccaacatcgtgtacaaggaggccaaggagagcgtggacgccctgttcgtgaacagccagtacgaccgcctgcaggccgacaccaacatcgccatgatccacgccgccgacaagcgcgtgcacagcattcgcgaggcctacctgcccgagctgagcgtgatccccggtgtgaacgccgccatcttcgaggaactcgagggccgcatctaggagctctatgatcgttcaaacatttggcaataaagtttcttaagattgaatcctgttgccggtcttgcgatgattatcatataatttctgttgaattacgttaagcatgtaataattaacatgtaatgcatgacgttatttatgagatgggtttttatgattagagtcccgcaattatacatttaatacgcgatagaaaacaaaatatagcgcgcaaactaggataaattatcgcgcgcggtgtcatctatgttactagatc

SEQ ID NO: 28 - DNA, 5152 bp, Artificial Sequence
  24383 cry1Ab expression cassette
ctgcagtgcagcgtgacccggtcgtgcccctctctagagataatgagcattgcatgtctaagttataaaaaattaccacatattttttttgtcacacttgtttgaagtgcagtttatctatctttatacatatatttaaactttactctacgaataatataatctatagtactacaataatatcagtgttttagagaatcatataaatgaacagttagacatggtctaaaggacaattgagtattttgacaacaggactctacagttttatctttttagtgtgcatgtgttctcctttttttttgcaaatagcttcacctatataatacttcatccattttattagtacatccatttagggtttagggttaatggtttttatagactaatttttttagtacatctattttattctattttagcctctaaattaagaaaactaaaactctattttagtttttttatttaataatttagatataaaatagaataaaataaagtgactaaaaattaaacaaataccctttaagaaattaaaaaaactaaggaaacatttttcttgtttcgagtagataatgccagcctgttaaacgccgtcgacgagtctaacggacaccaaccagcgaaccagcagcgtcgcgtcgggccaagcgaagcagacggcacggcatctctgtcgctgcctctggacccctctcgagagttccgctccaccgttggacttgctccgctgtcggcatccagaaattgcgtggcggagcggcagacgtgagccggcacggcaggcggcctcctcctcctctcacggcaccggcagctacgggggattcctttcccaccgctccttcgctttcccttcctcgcccgccgtaataaatagacaccccctccacaccctctttccccaacctcgtgttgttcggagcgcacacacacacaaccagatctcccccaaatccacccgtcggcacctccgcttcctagtcctttctctctctttctttctctctgctttattgaacttctcaaagttactaggtacgccgctcgtcctccccccccccccctctctaccttctctagatcggcgttccggtccatagttagggcccggtagttctacttctgttcatgtttgtgttagatccgtgtttgtgttagatccgtgctgctagcgttcgtacacggatgcgacctgtacgtcagacacgttctgattgctaacttgccagtgtttctctttggggaatcctgggatggctctagccgttccgcagacgggatcgatttcatgattttttttgtttcgttgcatagggtttggtttgcccttttcctttatttcaatatatgccgtgcacttgtttgtcgggtcatcttttcatgcttttttttgtcttggttgtgatgatgtggtctggttgggcggtcgttctagatcggagtagaattctgtttcaaactacctggtggatttattaattttggatctgtatgtgtgtgccatacatattcatagttacgaattgaagatgatggatggaaatatcgatctaggataggtatacatgttgatgcgggttttactgatgcatatacagagatgctttttgttcgcttggttgtgatgatgtggtgtggttgggcggtcgttcattcgttctagatcggagtagaatactgtttcaaactacctggtgtatttattaattttggaactgtatgtgtgtgtcatacatcttcatagttacgagtttaagatggatggaaatatcgatctaggataggtatacatgttgatgtgggttttactgatgcatatacatgatggcatatgcagcatctattcatatgctctaaccttgagtacctatctattataataaacaagtatgttttataattattttgatcttgatatacttggatgatggcatatccagcagctatatgtggatttttttagccctgccttcatacgctatttatttgcttggtactgtttcttttgtcgatgctcaccctgttgtttggtgttacttctgcaggatcctctaagtagcagccatggacaacaaccccaacatcaacgagtgcatcccctacaactgcctgagcaaccccgaggtggaggtgctgggcggcgagcgcatcgagaccggctacacccccatcgacatcagcctgagcctgacccagttcctgctgagcgagttcgtgcccggcgccggcttcgtgctgggcctggtggacatcatctggggcatcttcggccccagccagtgggacgccttcctggtgcagatcgagcagttgataaaccaacgcatagaggaattcgcccgcaaccaggccatcagccgcctggagggcctgagcaacctgtaccaaatctacgccgagagcttccgcgagtgggaggccgaccccaccaaccccgccctgcgcgaggagatgcgcatccagttcaacgacatgaacagcgccctgaccaccgccatccccctgttcgccgtgcagaactaccaggtgcccctgctgagcgtgtacgtgcaggccgccaacctgcacctgagcgtgctgcgcgacgtcagcgtgttcggccagcgctggggcttcgacgccgccaccatcaacagccgctacaacgacctgacccgcctgatcggcaactacaccgaccacgccgtgcgctggtacaacaccggcctggagcgcgtgtgggggcccgacagccgcgactggatcaggtacaaccagttccgccgcgagctgaccctgaccgtgctggacatcgtgagcctgttccccaactacgacagccgcacctaccccatccgcaccgtgagccagctgacccgcgagatttacaccaaccccgtgctggagaacttcgacggcagcttccgcggcagcgcccagggcatcgagggcagcatccgcagcccccacctgatggacatcctgaacagcatcaccatctacaccgacgcccaccgcggcgagtactactggagcggccaccagatcatggccagccccgtcggcttcagcggccccgagttcaccttccccctgtacggcacgatgggcaacgctgcacctcagcagcgcatcgtggcacagctgggccagggagtgtaccgcaccctgagcagcaccctgtaccgtcgacctttcaacatcggcatcaacaaccagcagctgagcgtgctggacggcaccgagttcgcctacggcaccagcagcaacctgcccagcgccgtgtaccgcaagagcggcaccgtggacagcctggacgagatcccccctcagaacaacaacgtgccacctcgacagggcttcagccaccgtctgagccacgtgagcatgttccgcagtggcttcagcaacagcagcgtgagcatcatccgtgcacctatgttcagctggattcaccgcagtgccgagttcaacaacatcatccccagcagccagatcacccagatccccctgaccaagagcaccaacctgggcagcggcaccagcgtggtgaagggccccggcttcaccggcggcgacatcctgcgccgcaccagccccggccagatcagcaccctgcgcgtgaacatcaccgcccccctgagccagcgctaccgcgtccgcatccgctacgccagcaccaccaacctgcagttccacaccagcatcgacggccgccccatcaaccagggcaacttcagcgccaccatgagcagcggcagcaacctgcagagcggcagcttccgcaccgtgggcttcaccacccccttcaacttcagcaacggcagcagcgtgttcaccctgagcgcccacgtgttcaacagcggcaacgaggtgtacatcgaccgcatcgagttcgtgcccgccgaggtgaccttcgaggccgagtacgacctggagagggctcagaaggccgtgaacgagctgttcaccagcagcaaccagatcggcctgaagaccgacgtgaccgactaccacatcgaccaggtgagcaacctggtggagtgcttaagcgacgagttctgcctggacgagaagaaggagctgagcgagaaggtgaagcacgccaagcgcctgagcgacgagcgcaacctgctgcaggaccccaacttccgcggcatcaaccgccagctggaccgcggctggcgaggcagcaccgatatcaccatccagggcggcgacgacgtgttcaaggagaactacgtgaccctgctgggcaccttcgacgagtgctaccccacctacctgtaccagaagatcgacgagagcaagctgaaggcctacacccgctaccagctgcgcggctacatcgaggacagccaggacctggaaatctacctgatccgctacaacgcgaagcacgagaccgtgaacgtgcccggcaccggcagcctgtggcccctgagcgcccccagccccatcggcaagtgcactagtcaccacagccaccacttcagcctggacatcgacgtgggctgcaccgacctgaacgaggacctgggcgtgtgggtgatcttcaagatcaagacccaggacggccacgcccgcctgggcaatctagagttcctggaggagaagcccctggtgggcgaggccctggcccgcgtgaagcgtgctgagaagaagtggcgcgacaagcgcgagaagctggagtgggagaccaacatcgtgtacaaggaggccaaggagagcgtggacgccctgttcgtgaacagccagtacgaccgcctgcaggccgacaccaacatcgccatgatccacgccgccgacaagcgcgtgcacagcattcgcgaggcctacctgcccgagctgagcgtgatccccggtgtgaacgccgccatcttcgaggaactcgagggccgcatctaggagctctatgatcgttcaaacatttggcaataaagtttcttaagattgaatcctgttgccggtcttgcgatgattatcatataatttctgttgaattacgttaagcatgtaataattaacatgtaatgcatgacgttatttatgagatgggtttttatgattagagtcccgcaattatacatttaatacgcgatagaaaacaaaatatagcgcgcaaactaggataaattatcgcgcgcggtgtcatctatgttactagatc

SEQ ID NO: 29 - RNA, 21 nt, Zea mays
cagagcucccuucacuccaaa

SEQ ID NO: 30 - RNA, 21 nt, Artificial Sequence
  Mutant miR159h-3p initiator sequence
aagagcaccguucacuccaac

SEQ ID NO: 31 - RNA, 22 nt, Zea mays
gaugacagauagagcagugagc

SEQ ID NO: 32 - RNA, 21 nt, Zea mays
uuugauugaaccgugccaaca

SEQ ID NO: 33 - RNA, 21 nt, Zea mays
uuucccacagcuuuauugaac

SEQ ID NO: 34 - RNA, 21 nt, Artificial Sequence
  miR396b-3p mutant
uuucucucugcuuuauugaac

SEQ ID NO: 35 - RNA, 21 nt, Artificial Sequence
  Mutant miR159h-3p
guuggagugaacggugcucuu

SEQ ID NO: 36 - RNA, 21 nt, Zeqa mays
uuuggagugaagggagcucug

SEQ ID NO: 37 - RNA, 22 nt, Zea mays
gcucacugcucuaucugucauc

SEQ ID NO: 38 - RNA, 21 nt, Zea mays
uguuggcacgguucaaucaaa

SEQ ID NO: 39 - RNA, 21 nt, Zea mays
guucaauaaagcugugggaaa

SEQ ID NO: 40 - RNA, 21 nt, Artificial Sequence
  Mutant miR396b-3p
guucaauaaagcagagagaaa

SEQ ID NO: 41 - DNA, 21 bp, Zea mays
cagagctcccttcactccaaa

SEQ ID NO: 42 - DNA, 21 bp, Artificial Sequence
  Mutant miR159h-3p
aagagcaccgttcactccaac

SEQ ID NO: 43 - DNA, 22 bp, Zea mays
gatgacagatagagcagtgagc

SEQ ID NO: 44 - DNA, 21 bp, Zea mays
tttgattgaaccgtgccaaca

SEQ ID NO: 45 - DNA, 21 bp, Zea mays
tttcccacagctttattgaac

SEQ ID NO: 46 - DNA, 21 bp, Artificial Sequence
  miR39b-3p mutant
tttctctctgctttattgaac

SEQ ID NO: 47 - DNA, 14976 bp, Artificial Sequence
  Vector 24366
attcctgtggttggcatgcacatacaaatggacgaacggataaaccttttcacgcccttttaaatatccgattattctaataaacgctcttttctcttaggtttacccgccaatatatcctgtcaaacactgatagtttaaactggcactagcctaacggtgttgactaactaggccgcttccctaattagctaacccgggggcgcgccgggaccctaattagctaaggtacctgcagtgcagcgtgacccggtcgtgcccctctctagagataatgagcattgcatgtctaagttataaaaaattaccacatattttttttgtcacacttgtttgaagtgcagtttatctatctttatacatatatttaaactttactctacgaataatataatctatagtactacaataatatcagtgttttagagaatcatataaatgaacagttagacatggtctaaaggacaattgagtattttgacaacaggactctacagttttatctttttagtgtgcatgtgttctcctttttttttgcaaatagcttcacctatataatacttcatccattttattagtacatccatttagggtttagggttaatggtttttatagactaatttttttagtacatctattttattctattttagcctctaaattaagaaaactaaaactctattttagtttttttatttaataatttagatataaaatagaataaaataaagtgactaaaaattaaacaaataccctttaagaaattaaaaaaactaaggaaacatttttcttgtttcgagtagataatgccagcctgttaaacgccgtcgacgagtctaacggacaccaaccagcgaaccagcagcgtcgcgtcgggccaagcgaagcagacggcacggcatctctgtcgctgcctctggacccctctcgagagttccgctccaccgttggacttgctccgctgtcggcatccagaaattgcgtggcggagcggcagacgtgagccggcacggcaggcggcctcctcctcctctcacggcaccggcagctacgggggattcctttcccaccgctccttcgctttcccttcctcgcccgccgtaataaatagacaccccctccacaccctctttccccaacctcgtgttgttcggagcgcacacacacacaaccagatctcccccaaatccacccgtcggcacctccgcttcctaggtacgccgctcgtcctccccccccccccctctctaccttctctagatcggcgttccggtccatagttagggcccggtagttctacttctgttcatgtttgtgttagatccgtgtttgtgttagatccgtgctgctagcgttcgtacacggatgcgacctgtacgtcagacacgttctgattgctaacttgccagtgtttctctttggggaatcctgggatggctctagccgttccgcagacgggatcgatttcatgattttttttgtttcgttgcatagggtttggtttgcccttttcctttatttcaatatatgccgtgcacttgtttgtcgggtcatcttttcatgcttttttttgtcttggttgtgatgatgtggtctggttgggcggtcgttctagatcggagtagaattctgtttcaaactacctggtggatttattaattttggatctgtatgtgtgtgccatacatattcatagttacgaattgaagatgatggatggaaatatcgatctaggataggtatacatgttgatgcgggttttactgatgcatatacagagatgctttttgttcgcttggttgtgatgatgtggtgtggttgggcggtcgttcattcgttctagatcggagtagaatactgtttcaaactacctggtgtatttattaattttggaactgtatgtgtgtgtcatacatcttcatagttacgagtttaagatggatggaaatatcgatctaggataggtatacatgttgatgtgggttttactgatgcatatacatgatggcatatgcagcatctattcatatgctctaaccttgagtacctatctattataataaacaagtatgttttataattattttgatcttgatatacttggatgatggcatatccagcagctatatgtggatttttttagccctgccttcatacgctatttatttgcttggtactgtttcttttgtcgatgctcaccctgttgtttggtgttacttctgcaggatcctctaagtagcagccatggacaacaaccccaacatcaacgagtgcatcccctacaactgcctgagcaaccccgaggtggaggtgctgggcggcgagcgcatcgagaccggctacacccccatcgacatcagcctgagcctgacccagttcctgctgagcgagttcgtgcccggcgccggcttcgtgctgggcctggtggacatcatctggggcatcttcggccccagccagtgggacgccttcctggtgcagatcgagcagttgataaaccaacgcatagaggaattcgcccgcaaccaggccatcagccgcctggagggcctgagcaacctgtaccaaatctacgccgagagcttccgcgagtgggaggccgaccccaccaaccccgccctgcgcgaggagatgcgcatccagttcaacgacatgaacagcgccctgaccaccgccatccccctgttcgccgtgcagaactaccaggtgcccctgctgagcgtgtacgtgcaggccgccaacctgcacctgagcgtgctgcgcgacgtcagcgtgttcggccagcgctggggcttcgacgccgccaccatcaacagccgctacaacgacctgacccgcctgatcggcaactacaccgaccacgccgtgcgctggtacaacaccggcctggagcgcgtgtgggggcccgacagccgcgactggatcaggtacaaccagttccgccgcgagctgaccctgaccgtgctggacatcgtgagcctgttccccaactacgacagccgcacctaccccatccgcaccgtgagccagctgacccgcgagatttacaccaaccccgtgctggagaacttcgacggcagcttccgcggcagcgcccagggcatcgagggcagcatccgcagcccccacctgatggacatcctgaacagcatcaccatctacaccgacgcccaccgcggcgagtactactggagcggccaccagatcatggccagccccgtcggcttcagcggccccgagttcaccttccccctgtacggcacgatgggcaacgctgcacctcagcagcgcatcgtggcacagctgggccagggagtgtaccgcaccctgagcagcaccctgtaccgtcgacctttcaacatcggcatcaacaaccagcagctgagcgtgctggacggcaccgagttcgcctacggcaccagcagcaacctgcccagcgccgtgtaccgcaagagcggcaccgtggacagcctggacgagatcccccctcagaacaacaacgtgccacctcgacagggcttcagccaccgtctgagccacgtgagcatgttccgcagtggcttcagcaacagcagcgtgagcatcatccgtgcacctatgttcagctggattcaccgcagtgccgagttcaacaacatcatccccagcagccagatcacccagatccccctgaccaagagcaccaacctgggcagcggcaccagcgtggtgaagggccccggcttcaccggcggcgacatcctgcgccgcaccagccccggccagatcagcaccctgcgcgtgaacatcaccgcccccctgagccagcgctaccgcgtccgcatccgctacgccagcaccaccaacctgcagttccacaccagcatcgacggccgccccatcaaccagggcaacttcagcgccaccatgagcagcggcagcaacctgcagagcggcagcttccgcaccgtgggcttcaccacccccttcaacttcagcaacggcagcagcgtgttcaccctgagcgcccacgtgttcaacagcggcaacgaggtgtacatcgaccgcatcgagttcgtgcccgccgaggtgaccttcgaggccgagtacgacctggagagggctcagaaggccgtgaacgagctgttcaccagcagcaaccagatcggcctgaagaccgacgtgaccgactaccacatcgaccaggtgagcaacctggtggagtgcttaagcgacgagttctgcctggacgagaagaaggagctgagcgagaaggtgaagcacgccaagcgcctgagcgacgagcgcaacctgctgcaggaccccaacttccgcggcatcaaccgccagctggaccgcggctggcgaggcagcaccgatatcaccatccagggcggcgacgacgtgttcaaggagaactacgtgaccctgctgggcaccttcgacgagtgctaccccacctacctgtaccagaagatcgacgagagcaagctgaaggcctacacccgctaccagctgcgcggctacatcgaggacagccaggacctggaaatctacctgatccgctacaacgcgaagcacgagaccgtgaacgtgcccggcaccggcagcctgtggcccctgagcgcccccagccccatcggcaagtgcactagtcaccacagccaccacttcagcctggacatcgacgtgggctgcaccgacctgaacgaggacctgggcgtgtgggtgatcttcaagatcaagacccaggacggccacgcccgcctgggcaatctagagttcctggaggagaagcccctggtgggcgaggccctggcccgcgtgaagcgtgctgagaagaagtggcgcgacaagcgcgagaagctggagtgggagaccaacatcgtgtacaaggaggccaaggagagcgtggacgccctgttcgtgaacagccagtacgaccgcctgcaggccgacaccaacatcgccatgatccacgccgccgacaagcgcgtgcacagcattcgcgaggcctacctgcccgagctgagcgtgatccccggtgtgaacgccgccatcttcgaggaactcgagggccgcatctaggagctctatgatcgttcaaacatttggcaataaagtttcttaagattgaatcctgttgccggtcttgcgatgattatcatataatttctgttgaattacgttaagcatgtaataattaacatgtaatgcatgacgttatttatgagatgggtttttatgattagagtcccgcaattatacatttaatacgcgatagaaaacaaaatatagcgcgcaaactaggataaattatcgcgcgcggtgtcatctatgttactagatcaatagactacggaccgcgatcgcttaattaagcttgcatgcctgcagtgcagcgtgacccggtcgtgcccctctctagagataatgagcattgcatgtctaagttataaaaaattaccacatattttttttgtcacacttgtttgaagtgcagtttatctatctttatacatatatttaaactttactctacgaataatataatctatagtactacaataatatcagtgttttagagaatcatataaatgaacagttagacatggtctaaaggacaattgagtattttgacaacaggactctacagttttatctttttagtgtgcatgtgttctcctttttttttgcaaatagcttcacctatataatacttcatccattttattagtacatccatttagggtttagggttaatggtttttatagactaatttttttagtacatctattttattctattttagcctctaaattaagaaaactaaaactctattttagtttttttatttaataatttagatataaaatagaataaaataaagtgactaaaaattaaacaaataccctttaagaaattaaaaaaactaaggaaacatttttcttgtttcgagtagataatgccagcctgttaaacgccgccgacgagtctaacggacaccaaccagcgaaccagcagcgtcgcgtcgggccaagcgaagcagacggcacggcatctctgtcgctgcctctggacccctctcgagagttccgctccaccgttggacttgctccgctgtcggcatccagaaattgcgtggcggagcggcagacgtgagccggcacggcaggcggcctcctcctcctctcacggcaccggcagctacgggggattcctttcccaccgctccttcgctttcccttcctcgcccgccgtaataaatagacaccccctccacaccctctttccccaacctcgtgttgttcggagcgcacacacacacaaccagatctcccccaaatccacccgtcggcacctccgcttcaaggtacgccgctcgtcctccccccccccccctctctaccttctctagatcggcgttccggtccatagttagggcccggtagttctacttctgttcatgtttgtgttagatccgtgtttgtgttagatccgtgctgttagcgttcgtacacggatgcgacctgtacgtcagacacgttctgattgctaacttgccagtgtttctctttggggaatcctgggatggctctagccgttccgcagacgggatcgatttcatgattttttttgtttcgttgcatagggtttggtttgcccttttcctttatttcaatatatgccgtgcacttgtttgtcgggtcatcttttcatgcttttttttgtcttggttgtgatgatgtggtctggttgggcggtcgttctagatcggagtagaattctgtttcaaactacctggtggatttattaattttggatctgtatgtgtgtgccatacatattcatagttacgaattgaagatgatggatggaaatatcgatctaggataggtatacatgttgatgcgggttttactgatgcatatacagagatgctttttgttcgcttggttgtgatgatgtggtgtggttgggcggtcgttcattcgttctagatcggagtagaatactgtttcaaactacctggtgtatttattaattttggaactgtatgtgtgtgtcatacatcttcatagttacgagtttaagatggatggaaatatcgatctaggataggtatacatgttgatgtgggttttactgatgcatatacatgatggcatatgcagcatctattcatatgctctaaccttgagtacctatctattataataaacaagtatgttttataattattttgatcttgatatacttggatgatggcatatgcagcagctatatgtggatttttttagccctgccttcatacgctatttatttgcttggtactgtttcttttgtcgatgctcaccctgttgtttggtgttacttctgcagggatctccgatcatgcaaaaactcattaactcagtgcaaaactatgcctggggcagcaaaacggcgttgactgaactttatggtatggaaaatccgtccagccagccgatggccgagctgtggatgggcgcacatccgaaaagcagttcacgagtgcagaatgccgccggagatatcgtttcactgcgtgatgtgattgagagtgataaatcgactctgctcggagaggccgttgccaaacgctttggcgaactgcctttcctgttcaaagtattatgcgcagcacagccactctccattcaggttcatccaaacaaacacaattctgaaatcggttttgccaaagaaaatgccgcaggtatcccgatggatgccgccgagcgtaactataaagatcctaaccacaagccggagctggtttttgcgctgacgcctttccttgcgatgaacgcgtttcgtgaattttccgagattgtctccctactccagccggtcgcaggtgcacatccggcgattgctcactttttacaacagcctgatgccgaacgtttaagcgaactgttcgccagcctgttgaatatgcagggtgaagaaaaatcccgcgcgctggcgattttaaaatcggccctcgatagccagcagggtgaaccgtggcaaacgattcgtttaatttctgaattttacccggaagacagcggtctgttctccccgctattgctgaatgtggtgaaattgaaccctggcgaagcgatgttcctgttcgctgaaacaccgcacgcttacctgcaaggcgtggcgctggaagtgatggcaaactccgataacgtgctgcgtgcgggtctgacgcctaaatacattgatattccggaactggttgccaatgtgaaattcgaagccaaaccggctaaccagttgttgacccagccggtgaaacaaggtgcagaactggacttcccgattccagtggatgattttgccttctcgctgcatgaccttagtgataaagaaaccaccattagccagcagagtgccgccattttgttctgcgtcgaaggcgatgcaacgttgtggaaaggttctcagcagttacagcttaaaccgggtgaatcagcgtttattgccgccaacgaatcaccggtgactgtcaaaggccacggccgtttagcgcgtgtttacaacaagctgtaagagcttactgaaaaaattaacatctcttgctaagctgggtcatgggtcgtttaagctgccgatgtgcctgcgtcgtctggtgccctctctccatatggaggttgtcaaagtatctgctgttcgtgtcatgagtcgtgtcagtgttggtttaataatggaccggttgtgttgtgtgtgcgtactacccagaactatgacaaatcatgaataagtttgatgtttgaaattaaagcctgtgctcattatgttctgtctttcagttgtctcctaatatttgcctccaggtactggctatctaccgtttcttacttaggaggtgtttgaatgcactaaaactaatagttagtggctaaaattagttaaaacatccaaacaccatagctaatagttgaactattagctatttttggaaaattagttaatagtgaggtagttatttgttagctagctaattcaactaacaatttttagccaactaacaattagtttcagtgcattcaaacacccccttaatgttaacgtggttctatctaccgtctcctaatatatggttgattgttcggtttgttgctatgctattgggttctgattgctgctagttcttgctgaatccagaagttctcgtagtatagctcagattcatattatttatttgagtgataagtgatccaggttattactatgttagctaggttttttttacaaggataaattatctgtgatcataattcttatgaaagctttatgtttcctggaggcagtggcatgcaatgcatgacagcaacttgatcacaccagctgaggtagatacggtaacaaggttcttaaatctgttcaccaaatcattggagaacacacatacacattcttgccagtcttggttagagaaatttcatgacaaaatgccaaagctgtcttgactcttcacttttggccatgagtcgtgacttagtttggtttaatggaccggttctcctagcttgttctactcaaaactgttgttgatgcgaataagttgtgatggttgatctctggattttgttttgctctcaatagtggacgagattagatagcctgcaggcccgggggcgcgccctaattagctaacggccaggatcgccgcgtgagcctttagcaactagctagattaattaacgcaatctgttattaagttgtctaagcgtcaatttgtttacaccacaatatatcctgccaccagccagccaacagctccccgaccggcagctcggcacaaaatcaccactcgatacaggcagcccatcagaattaattctcatgtttgacagcttatcatcgactgcacggtgcaccaatgcttctggcgtcaggcagccatcggaagctgtggtatggctgtgcaggtcgtaaatcactgcataattcgtgtcgctcaaggcgcactcccgttctggataatgttttttgcgccgacatcataacggttctggcaaatattctgaaatgagctgttgacaattaatcatccggctcgtataatgtgtggaattgtgagcggataacaatttcacacaggaaacagaccatgagggaagcgttgatcgccgaagtatcgactcaactatcagaggtagttggcgtcatcgagcgccatctcgaaccgacgttgctggccgtacatttgtacggctccgcagtggatggcggcctgaagccacacagtgatattgatttgctggttacggtgaccgtaaggcttgatgaaacaacgcggcgagctttgatcaacgaccttttggaaacttcggcttcccctggagagagcgagattctccgcgctgtagaagtcaccattgttgtgcacgacgacatcattccgtggcgttatccagctaagcgcgaactgcaatttggagaatggcagcgcaatgacattcttgcaggtatcttcgagccagccacgatcgacattgatctggctatcttgctgacaaaagcaagagaacatagcgttgccttggtaggtccagcggcggaggaactctttgatccggttcctgaacaggatctatttgaggcgctaaatgaaaccttaacgctatggaactcgccgcccgactgggctggcgatgagcgaaatgtagtgcttacgttgtcccgcatttggtacagcgcagtaaccggcaaaatcgcgccgaaggatgtcgctgccgactgggcaatggagcgcctgccggcccagtatcagcccgtcatacttgaagctaggcaggcttatcttggacaagaagatcgcttggcctcgcgcgcagatcagttggaagaatttgttcactacgtgaaaggcgagatcaccaaagtagtcggcaaataaagctctagtggatctccgtacccagggatctggctcgcggcggacgcacgacgccggggcgagaccataggcgatctcctaaatcaatagtagctgtaacctcgaagcgtttcacttgtaacaacgattgagaatttttgtcataaaattgaaatacttggttcgcatttttgtcatccgcggtcagccgcaattctgacgaactgcccatttagctggagatgattgtacatccttcacgtgaaaatttctcaagcgctgtgaacaagggttcagattttagattgaaaggtgagccgttgaaacacgttcttcttgtcgatgacgacgtcgctatgcggcatcttattattgaataccttacgatccacgccttcaaagtgaccgcggtagccgacagcacccagttcacaagagtactctcttccgcgacggtcgatgtcgtggttgttgatctagatttaggtcgtgaagatgggctcgagatcgttcgtaatctggcggcaaagtctgatattccaatcataattatcagtggcgaccgccttgaggagacggataaagttgttgcactcgagctaggagcaagtgattttatcgctaagccgttcagtatcagagagtttctagcacgcattcgggttgccttgcgcgtgcgccccaacgttgtccgctccaaagaccgacggtctttttgttttactgactggacacttaatctcaggcaacgtcgcttgatgtccgaagctggcggtgaggtgaaacttacggcaggtgagttcaatcttctcctcgcgtttttagagaaaccccgcgacgttctatcgcgcgagcaacttctcattgccagtcgagtacgcgacgaggaggtttatgacaggagtatagatgttctcattttgaggctgcgccgcaaacttgaggcagatccgtcaagccctcaactgataaaaacagcaagaggtgccggttatttctttgacgcggacgtgcaggtttcgcacggggggacgatggcagcctgagccaattcccagatccccgaggaatcggcgtgagcggtcgcaaaccatccggcccggtacaaatcggcgcggcgctgggtgatgacctggtggagaagttgaaggccgcgcaggccgcccagcggcaacgcatcgaggcagaagcacgccccggtgaatcgtggcaagcggccgctgatcgaatccgcaaagaatcccggcaaccgccggcagccggtgcgccgtcgattaggaagccgcccaagggcgacgagcaaccagattttttcgttccgatgctctatgacgtgggcacccgcgatagtcgcagcatcatggacgtggccgttttccgtctgtcgaagcgtgaccgacgagctggcgaggtgatccgctacgagcttccagacgggcacgtagaggtttccgcagggccggccggcatggccagtgtgtgggattacgacctggtactgatggcggtttcccatctaaccgaatccatgaaccgataccgggaagggaagggagacaagcccggccgcgtgttccgtccacacgttgcggacgtactcaagttctgccggcgagccgatggcggaaagcagaaagacgacctggtagaaacctgcattcggttaaacaccacgcacgttgccatgcagcgtacgaagaaggccaagaacggccgcctggtgacggtatccgagggtgaagccttgattagccgctacaagatcgtaaagagcgaaaccgggcggccggagtacatcgagatcgagctggctgattggatgtaccgcgagatcacagaaggcaagaacccggacgtgctgacggttcaccccgattactttttgatcgatcccggcatcggccgttttctctaccgcctggcacgccgcgccgcaggcaaggcagaagccagatggttgttcaagacgatctacgaacgcagtggcagcgccggagagttcaagaagttctgtttcaccgtgcgcaagctgatcgggtcaaatgacctgccggagtacgatttgaaggaggaggcggggcaggctggcccgatcctagtcatgcgctaccgcaacctgatcgagggcgaagcatccgccggttcctaatgtacggagcagatgctagggcaaattgccctagcaggggaaaaaggtcgaaaaggtctctttcctgtggatagcacgtacattgggaacccaaagccgtacattgggaaccggaacccgtacattgggaacccaaagccgtacattgggaaccggtcacacatgtaagtgactgatataaaagagaaaaaaggcgatttttccgcctaaaactctttaaaacttattaaaactcttaaaacccgcctggcctgtgcataactgtctggccagcgcacagccgaagagctgcaaaaagcgcctacccttcggtcgctgcgctccctacgccccgccgcttcgcgtcggcctatcgcggccgctggccgctcaaaaatggctggcctacggccaggcaatctaccagggcgcggacaagccgcgccgtcgccactcgaccgccggcgctgaggtctgcctcgtgaagaaggtgttgctgactcataccaggcctgaatcgccccatcatccagccagaaagtgagggagccacggttgatgagagctttgttgtaggtggaccagttggtgattttgaacttttgctttgccacggaacggtctgcgttgtcgggaagatgcgtgatctgatccttcaactcagcaaaagttcgatttattcaacaaagccgccgtcccgtcaagtcagcgtaatgctctgccagtgttacaaccaattaaccaattctgattagaaaaactcatcgagcatcaaatgaaactgcaatttattcatatcaggattatcaataccatatttttgaaaaagccgtttctgtaatgaaggagaaaactcaccgaggcagttccataggatggcaagatcctggtatcggtctgcgattccgactcgtccaacatcaatacaacctattaatttcccctcgtcaaaaataaggttatcaagtgagaaatcaccatgagtgacgactgaatccggtgagaatggcaaaagctctgcattaatgaatcggccaacgcgcggggagaggcggtttgcgtattgggcgctcttccgcttcctcgctcactgactcgctgcgctcggtcgttcggctgcggcgagcggtatcagctcactcaaaggcggtaatacggttatccacagaatcaggggataacgcaggaaagaacatgtgagcaaaaggccagcaaaaggccaggaaccgtaaaaaggccgcgttgctggcgtttttccataggctccgcccccctgacgagcatcacaaaaatcgacgctcaagtcagaggtggcgaaacccgacaggactataaagataccaggcgtttccccctggaagctccctcgtgcgctctcctgttccgaccctgccgcttaccggatacctgtccgcctttctcccttcgggaagcgtggcgctttctcatagctcacgctgtaggtatctcagttcggtgtaggtcgttcgctccaagctgggctgtgtgcacgaaccccccgttcagcccgaccgctgcgccttatccggtaactatcgtcttgagtccaacccggtaagacacgacttatcgccactggcagcagccactggtaacaggattagcagagcgaggtatgtaggcggtgctacagagttcttgaagtggtggcctaactacggctacactagaagaacagtatttggtatctgcgctctgctgaagccagttaccttcggaaaaagagttggtagctcttgatccggcaaacaaaccaccgctggtagcggtggtttttttgtttgcaagcagcagattacgcgcagaaaaaaaggatctcaagaagatcctttgatcttttctacggggtctgacgctcagtggaacgaaaactcacgttaagggattttggtcatgagattatcaaaaaggatcttcacctagatccttttgatccggaatta

SEQ ID NO: 48 - DNA, 15033 bp, Artificial Sequence
  Vector 24373
attcctgtggttggcatgcacatacaaatggacgaacggataaaccttttcacgcccttttaaatatccgattattctaataaacgctcttttctcttaggtttacccgccaatatatcctgtcaaacactgatagtttaaactggcactagcctaacggtgttgactaactaggccgcttccctaattagctaacccgggggcgcgccgggaccctaattagctaaggtacctgcagtgcagcgtgacccggtcgtgcccctctctagagataatgagcattgcatgtctaagttataaaaaattaccacatattttttttgtcacacttgtttgaagtgcagtttatctatctttatacatatatttaaactttactctacgaataatataatctatagtactacaataatatcagtgttttagagaatcatataaatgaacagttagacatggtctaaaggacaattgagtattttgacaacaggactctacagttttatctttttagtgtgcatgtgttctcctttttttttgcaaatagcttcacctatataatacttcatccattttattagtacatccatttagggtttagggttaatggtttttatagactaatttttttagtacatctattttattctattttagcctctaaattaagaaaactaaaactctattttagtttttttatttaataatttagatataaaatagaataaaataaagtgactaaaaattaaacaaataccctttaagaaattaaaaaaactaaggaaacatttttcttgtttcgagtagataatgccagcctgttaaacgccgtcgacgagtctaacggacaccaaccagcgaaccagcagcgtcgcgtcgggccaagcgaagcagacggcacggcatctctgtcgctgcctctggacccctctcgagagttccgctccaccgttggacttgctccgctgtcggcatccagaaattgcgtggcggagcggcagacgtgagccggcacggcaggcggcctcctcctcctctcacggcaccggcagctacgggggattcctttcccaccgctccttcgctttcccttcctcgcccgccgtaataaatagacaccccctccacaccctctttccccaacctcgtgttgttcggagcgcacacacacacaaccagatctcccccaaatccacccgtcggcacctccgcttcctaggtacgccgctcgtcctccccccccccccctctctaccttctctagatcggcgttccggtccatagttagggcccggtagttctacttctgttcatgtttgtgttagatccgtgtttgtgttagatccgtgctgctagcgttcgtacacggatgcgacctgtacgtcagacacgttctgattgctaacttgccagtgtttctctttggggaatcctgggatggctctagccgttccgcagacgggatcgatttcatgattttttttgtttcgttgcatagggtttggtttgcccttttcctttatttcaatatatgccgtgcacttgtttgtcgggtcatcttttcatgcttttttttgtcttggttgtgatgatgtggtctggttgggcggtcgttctagatcggagtagaattctgtttcaaactacctggtggatttattaattttggatctgtatgtgtgtgccatacatattcatagttacgaattgaagatgatggatggaaatatcgatctaggataggtatacatgttgatgcgggttttactgatgcatatacagagatgctttttgttcgcttggttgtgatgatgtggtgtggttgggcggtcgttcattcgttctagatcggagtagaatactgtttcaaactacctggtgtatttattaattttggaactgtatgtgtgtgtcatacatcttcatagttacgagtttaagatggatggaaatatcgatctaggataggtatacatgttgatgtgggttttactgatgcatatacatgatggcatatgcagcatctattcatatgctctaaccttgagtacctatctattataataaacaagtatgttttataattattttgatcttgatatacttggatgatggcatatccagcagctatatgtggatttttttagccctgccttcatacgctatttatttgcttggtactgtttcttttgtcgatgctcaccctgttgtttggtgttacttctgcaggatcctctaagtagcagccatggacaacaaccccaacatcaacgagtgcatcccctacaactgcctgagcaaccccgaggtggaggtgctgggcggcgagcgcatcgagaccggctacacccccatcgacatcagcctgagcctgacccagttcctgctgagcgagttcgtgcccggcgccggcttcgtgctgggcctggtggacatcatctggggcatcttcggccccagccagtgggacgccttcctggtgcagatcgagcagttgataaaccaacgcatagaggaattcgcccgcaaccaggccatcagccgcctggagggcctgagcaacctgtaccaaatctacgccgagagcttccgcgagtgggaggccgaccccaccaaccccgccctgcgcgaggagatgcgcatccagttcaacgacatgaacagcgccctgaccaccgccatccccctgttcgccgtgcagaactaccaggtgcccctgctgagcgtgtacgtgcaggccgccaacctgcacctgagcgtgctgcgcgacgtcagcgtgttcggccagcgctggggcttcgacgccgccaccatcaacagccgctacaacgacctgacccgcctgatcggcaactacaccgaccacgccgtgcgctggtacaacaccggcctggagcgcgtgtgggggcccgacagccgcgactggatcaggtacaaccagttccgccgcgagctgaccctgaccgtgctggacatcgtgagcctgttccccaactacgacagccgcacctaccccatccgcaccgtgagccagctgacccgcgagatttacaccaaccccgtgctggagaacttcgacggcagcttccgcggcagcgcccagggcatcgagggcagcatccgcagcccccacctgatggacatcctgaacagcatcaccatctacaccgacgcccaccgcggcgagtactactggagcggccaccagatcatggccagccccgtcggcttcagcggccccgagttcaccttccccctgtacggcacgatgggcaacgctgcacctcagcagcgcatcgtggcacagctgggccagggagtgtaccgcaccctgagcagcaccctgtaccgtcgacctttcaacatcggcatcaacaaccagcagctgagcgtgctggacggcaccgagttcgcctacggcaccagcagcaacctgcccagcgccgtgtaccgcaagagcggcaccgtggacagcctggacgagatcccccctcagaacaacaacgtgccacctcgacagggcttcagccaccgtctgagccacgtgagcatgttccgcagtggcttcagcaacagcagcgtgagcatcatccgtgcacctatgttcagctggattcaccgcagtgccgagttcaacaacatcatccccagcagccagatcacccagatccccctgaccaagagcaccaacctgggcagcggcaccagcgtggtgaagggccccggcttcaccggcggcgacatcctgcgccgcaccagccccggccagatcagcaccctgcgcgtgaacatcaccgcccccctgagccagcgctaccgcgtccgcatccgctacgccagcaccaccaacctgcagttccacaccagcatcgacggccgccccatcaaccagggcaacttcagcgccaccatgagcagcggcagcaacctgcagagcggcagcttccgcaccgtgggcttcaccacccccttcaacttcagcaacggcagcagcgtgttcaccctgagcgcccacgtgttcaacagcggcaacgaggtgtacatcgaccgcatcgagttcgtgcccgccgaggtgaccttcgaggccgagtacgacctggagagggctcagaaggccgtgaacgagctgttcaccagcagcaaccagatcggcctgaagaccgacgtgaccgactaccacatcgaccaggtgagcaacctggtggagtgcttaagcgacgagttctgcctggacgagaagaaggagctgagcgagaaggtgaagcacgccaagcgcctgagcgacgagcgcaacctgctgcaggaccccaacttccgcggcatcaaccgccagctggaccgcggctggcgaggcagcaccgatatcaccatccagggcggcgacgacgtgttcaaggagaactacgtgaccctgctgggcaccttcgacgagtgctaccccacctacctgtaccagaagatcgacgagagcaagctgaaggcctacacccgctaccagctgcgcggctacatcgaggacagccaggacctggaaatctacctgatccgctacaacgcgaagcacgagaccgtgaacgtgcccggcaccggcagcctgtggcccctgagcgcccccagccccatcggcaagtgcactagcatccttttcattgataagaagagcaccgttcactccaactgcaaacttgtggctagtcaccacagccaccacttcagcctggacatcgacgtgggctgcaccgacctgaacgaggacctgggcgtgtgggtgatcttcaagatcaagacccaggacggccacgcccgcctgggcaatctagagttcctggaggagaagcccctggtgggcgaggccctggcccgcgtgaagcgtgctgagaagaagtggcgcgacaagcgcgagaagctggagtgggagaccaacatcgtgtacaaggaggccaaggagagcgtggacgccctgttcgtgaacagccagtacgaccgcctgcaggccgacaccaacatcgccatgatccacgccgccgacaagcgcgtgcacagcattcgcgaggcctacctgcccgagctgagcgtgatccccggtgtgaacgccgccatcttcgaggaactcgagggccgcatctaggagctctatgatcgttcaaacatttggcaataaagtttcttaagattgaatcctgttgccggtcttgcgatgattatcatataatttctgttgaattacgttaagcatgtaataattaacatgtaatgcatgacgttatttatgagatgggtttttatgattagagtcccgcaattatacatttaatacgcgatagaaaacaaaatatagcgcgcaaactaggataaattatcgcgcgcggtgtcatctatgttactagatcaatagactacggaccgcgatcgcttaattaagcttgcatgcctgcagtgcagcgtgacccggtcgtgcccctctctagagataatgagcattgcatgtctaagttataaaaaattaccacatattttttttgtcacacttgtttgaagtgcagtttatctatctttatacatatatttaaactttactctacgaataatataatctatagtactacaataatatcagtgttttagagaatcatataaatgaacagttagacatggtctaaaggacaattgagtattttgacaacaggactctacagttttatctttttagtgtgcatgtgttctcctttttttttgcaaatagcttcacctatataatacttcatccattttattagtacatccatttagggtttagggttaatggtttttatagactaatttttttagtacatctattttattctattttagcctctaaattaagaaaactaaaactctattttagtttttttatttaataatttagatataaaatagaataaaataaagtgactaaaaattaaacaaataccctttaagaaattaaaaaaactaaggaaacatttttcttgtttcgagtagataatgccagcctgttaaacgccgccgacgagtctaacggacaccaaccagcgaaccagcagcgtcgcgtcgggccaagcgaagcagacggcacggcatctctgtcgctgcctctggacccctctcgagagttccgctccaccgttggacttgctccgctgtcggcatccagaaattgcgtggcggagcggcagacgtgagccggcacggcaggcggcctcctcctcctctcacggcaccggcagctacgggggattcctttcccaccgctccttcgctttcccttcctcgcccgccgtaataaatagacaccccctccacaccctctttccccaacctcgtgttgttcggagcgcacacacacacaaccagatctcccccaaatccacccgtcggcacctccgcttcaaggtacgccgctcgtcctccccccccccccctctctaccttctctagatcggcgttccggtccatagttagggcccggtagttctacttctgttcatgtttgtgttagatccgtgtttgtgttagatccgtgctgttagcgttcgtacacggatgcgacctgtacgtcagacacgttctgattgctaacttgccagtgtttctctttggggaatcctgggatggctctagccgttccgcagacgggatcgatttcatgattttttttgtttcgttgcatagggtttggtttgcccttttcctttatttcaatatatgccgtgcacttgtttgtcgggtcatcttttcatgcttttttttgtcttggttgtgatgatgtggtctggttgggcggtcgttctagatcggagtagaattctgtttcaaactacctggtggatttattaattttggatctgtatgtgtgtgccatacatattcatagttacgaattgaagatgatggatggaaatatcgatctaggataggtatacatgttgatgcgggttttactgatgcatatacagagatgctttttgttcgcttggttgtgatgatgtggtgtggttgggcggtcgttcattcgttctagatcggagtagaatactgtttcaaactacctggtgtatttattaattttggaactgtatgtgtgtgtcatacatcttcatagttacgagtttaagatggatggaaatatcgatctaggataggtatacatgttgatgtgggttttactgatgcatatacatgatggcatatgcagcatctattcatatgctctaaccttgagtacctatctattataataaacaagtatgttttataattattttgatcttgatatacttggatgatggcatatgcagcagctatatgtggatttttttagccctgccttcatacgctatttatttgcttggtactgtttcttttgtcgatgctcaccctgttgtttggtgttacttctgcagggatctccgatcatgcaaaaactcattaactcagtgcaaaactatgcctggggcagcaaaacggcgttgactgaactttatggtatggaaaatccgtccagccagccgatggccgagctgtggatgggcgcacatccgaaaagcagttcacgagtgcagaatgccgccggagatatcgtttcactgcgtgatgtgattgagagtgataaatcgactctgctcggagaggccgttgccaaacgctttggcgaactgcctttcctgttcaaagtattatgcgcagcacagccactctccattcaggttcatccaaacaaacacaattctgaaatcggttttgccaaagaaaatgccgcaggtatcccgatggatgccgccgagcgtaactataaagatcctaaccacaagccggagctggtttttgcgctgacgcctttccttgcgatgaacgcgtttcgtgaattttccgagattgtctccctactccagccggtcgcaggtgcacatccggcgattgctcactttttacaacagcctgatgccgaacgtttaagcgaactgttcgccagcctgttgaatatgcagggtgaagaaaaatcccgcgcgctggcgattttaaaatcggccctcgatagccagcagggtgaaccgtggcaaacgattcgtttaatttctgaattttacccggaagacagcggtctgttctccccgctattgctgaatgtggtgaaattgaaccctggcgaagcgatgttcctgttcgctgaaacaccgcacgcttacctgcaaggcgtggcgctggaagtgatggcaaactccgataacgtgctgcgtgcgggtctgacgcctaaatacattgatattccggaactggttgccaatgtgaaattcgaagccaaaccggctaaccagttgttgacccagccggtgaaacaaggtgcagaactggacttcccgattccagtggatgattttgccttctcgctgcatgaccttagtgataaagaaaccaccattagccagcagagtgccgccattttgttctgcgtcgaaggcgatgcaacgttgtggaaaggttctcagcagttacagcttaaaccgggtgaatcagcgtttattgccgccaacgaatcaccggtgactgtcaaaggccacggccgtttagcgcgtgtttacaacaagctgtaagagcttactgaaaaaattaacatctcttgctaagctgggtcatgggtcgtttaagctgccgatgtgcctgcgtcgtctggtgccctctctccatatggaggttgtcaaagtatctgctgttcgtgtcatgagtcgtgtcagtgttggtttaataatggaccggttgtgttgtgtgtgcgtactacccagaactatgacaaatcatgaataagtttgatgtttgaaattaaagcctgtgctcattatgttctgtctttcagttgtctcctaatatttgcctccaggtactggctatctaccgtttcttacttaggaggtgtttgaatgcactaaaactaatagttagtggctaaaattagttaaaacatccaaacaccatagctaatagttgaactattagctatttttggaaaattagttaatagtgaggtagttatttgttagctagctaattcaactaacaatttttagccaactaacaattagtttcagtgcattcaaacacccccttaatgttaacgtggttctatctaccgtctcctaatatatggttgattgttcggtttgttgctatgctattgggttctgattgctgctagttcttgctgaatccagaagttctcgtagtatagctcagattcatattatttatttgagtgataagtgatccaggttattactatgttagctaggttttttttacaaggataaattatctgtgatcataattcttatgaaagctttatgtttcctggaggcagtggcatgcaatgcatgacagcaacttgatcacaccagctgaggtagatacggtaacaaggttcttaaatctgttcaccaaatcattggagaacacacatacacattcttgccagtcttggttagagaaatttcatgacaaaatgccaaagctgtcttgactcttcacttttggccatgagtcgtgacttagtttggtttaatggaccggttctcctagcttgttctactcaaaactgttgttgatgcgaataagttgtgatggttgatctctggattttgttttgctctcaatagtggacgagattagatagcctgcaggcccgggggcgcgccctaattagctaacggccaggatcgccgcgtgagcctttagcaactagctagattaattaacgcaatctgttattaagttgtctaagcgtcaatttgtttacaccacaatatatcctgccaccagccagccaacagctccccgaccggcagctcggcacaaaatcaccactcgatacaggcagcccatcagaattaattctcatgtttgacagcttatcatcgactgcacggtgcaccaatgcttctggcgtcaggcagccatcggaagctgtggtatggctgtgcaggtcgtaaatcactgcataattcgtgtcgctcaaggcgcactcccgttctggataatgttttttgcgccgacatcataacggttctggcaaatattctgaaatgagctgttgacaattaatcatccggctcgtataatgtgtggaattgtgagcggataacaatttcacacaggaaacagaccatgagggaagcgttgatcgccgaagtatcgactcaactatcagaggtagttggcgtcatcgagcgccatctcgaaccgacgttgctggccgtacatttgtacggctccgcagtggatggcggcctgaagccacacagtgatattgatttgctggttacggtgaccgtaaggcttgatgaaacaacgcggcgagctttgatcaacgaccttttggaaacttcggcttcccctggagagagcgagattctccgcgctgtagaagtcaccattgttgtgcacgacgacatcattccgtggcgttatccagctaagcgcgaactgcaatttggagaatggcagcgcaatgacattcttgcaggtatcttcgagccagccacgatcgacattgatctggctatcttgctgacaaaagcaagagaacatagcgttgccttggtaggtccagcggcggaggaactctttgatccggttcctgaacaggatctatttgaggcgctaaatgaaaccttaacgctatggaactcgccgcccgactgggctggcgatgagcgaaatgtagtgcttacgttgtcccgcatttggtacagcgcagtaaccggcaaaatcgcgccgaaggatgtcgctgccgactgggcaatggagcgcctgccggcccagtatcagcccgtcatacttgaagctaggcaggcttatcttggacaagaagatcgcttggcctcgcgcgcagatcagttggaagaatttgttcactacgtgaaaggcgagatcaccaaagtagtcggcaaataaagctctagtggatctccgtacccagggatctggctcgcggcggacgcacgacgccggggcgagaccataggcgatctcctaaatcaatagtagctgtaacctcgaagcgtttcacttgtaacaacgattgagaatttttgtcataaaattgaaatacttggttcgcatttttgtcatccgcggtcagccgcaattctgacgaactgcccatttagctggagatgattgtacatccttcacgtgaaaatttctcaagcgctgtgaacaagggttcagattttagattgaaaggtgagccgttgaaacacgttcttcttgtcgatgacgacgtcgctatgcggcatcttattattgaataccttacgatccacgccttcaaagtgaccgcggtagccgacagcacccagttcacaagagtactctcttccgcgacggtcgatgtcgtggttgttgatctagatttaggtcgtgaagatgggctcgagatcgttcgtaatctggcggcaaagtctgatattccaatcataattatcagtggcgaccgccttgaggagacggataaagttgttgcactcgagctaggagcaagtgattttatcgctaagccgttcagtatcagagagtttctagcacgcattcgggttgccttgcgcgtgcgccccaacgttgtccgctccaaagaccgacggtctttttgttttactgactggacacttaatctcaggcaacgtcgcttgatgtccgaagctggcggtgaggtgaaacttacggcaggtgagttcaatcttctcctcgcgtttttagagaaaccccgcgacgttctatcgcgcgagcaacttctcattgccagtcgagtacgcgacgaggaggtttatgacaggagtatagatgttctcattttgaggctgcgccgcaaacttgaggcagatccgtcaagccctcaactgataaaaacagcaagaggtgccggttatttctttgacgcggacgtgcaggtttcgcacggggggacgatggcagcctgagccaattcccagatccccgaggaatcggcgtgagcggtcgcaaaccatccggcccggtacaaatcggcgcggcgctgggtgatgacctggtggagaagttgaaggccgcgcaggccgcccagcggcaacgcatcgaggcagaagcacgccccggtgaatcgtggcaagcggccgctgatcgaatccgcaaagaatcccggcaaccgccggcagccggtgcgccgtcgattaggaagccgcccaagggcgacgagcaaccagattttttcgttccgatgctctatgacgtgggcacccgcgatagtcgcagcatcatggacgtggccgttttccgtctgtcgaagcgtgaccgacgagctggcgaggtgatccgctacgagcttccagacgggcacgtagaggtttccgcagggccggccggcatggccagtgtgtgggattacgacctggtactgatggcggtttcccatctaaccgaatccatgaaccgataccgggaagggaagggagacaagcccggccgcgtgttccgtccacacgttgcggacgtactcaagttctgccggcgagccgatggcggaaagcagaaagacgacctggtagaaacctgcattcggttaaacaccacgcacgttgccatgcagcgtacgaagaaggccaagaacggccgcctggtgacggtatccgagggtgaagccttgattagccgctacaagatcgtaaagagcgaaaccgggcggccggagtacatcgagatcgagctggctgattggatgtaccgcgagatcacagaaggcaagaacccggacgtgctgacggttcaccccgattactttttgatcgatcccggcatcggccgttttctctaccgcctggcacgccgcgccgcaggcaaggcagaagccagatggttgttcaagacgatctacgaacgcagtggcagcgccggagagttcaagaagttctgtttcaccgtgcgcaagctgatcgggtcaaatgacctgccggagtacgatttgaaggaggaggcggggcaggctggcccgatcctagtcatgcgctaccgcaacctgatcgagggcgaagcatccgccggttcctaatgtacggagcagatgctagggcaaattgccctagcaggggaaaaaggtcgaaaaggtctctttcctgtggatagcacgtacattgggaacccaaagccgtacattgggaaccggaacccgtacattgggaacccaaagccgtacattgggaaccggtcacacatgtaagtgactgatataaaagagaaaaaaggcgatttttccgcctaaaactctttaaaacttattaaaactcttaaaacccgcctggcctgtgcataactgtctggccagcgcacagccgaagagctgcaaaaagcgcctacccttcggtcgctgcgctccctacgccccgccgcttcgcgtcggcctatcgcggccgctggccgctcaaaaatggctggcctacggccaggcaatctaccagggcgcggacaagccgcgccgtcgccactcgaccgccggcgctgaggtctgcctcgtgaagaaggtgttgctgactcataccaggcctgaatcgccccatcatccagccagaaagtgagggagccacggttgatgagagctttgttgtaggtggaccagttggtgattttgaacttttgctttgccacggaacggtctgcgttgtcgggaagatgcgtgatctgatccttcaactcagcaaaagttcgatttattcaacaaagccgccgtcccgtcaagtcagcgtaatgctctgccagtgttacaaccaattaaccaattctgattagaaaaactcatcgagcatcaaatgaaactgcaatttattcatatcaggattatcaataccatatttttgaaaaagccgtttctgtaatgaaggagaaaactcaccgaggcagttccataggatggcaagatcctggtatcggtctgcgattccgactcgtccaacatcaatacaacctattaatttcccctcgtcaaaaataaggttatcaagtgagaaatcaccatgagtgacgactgaatccggtgagaatggcaaaagctctgcattaatgaatcggccaacgcgcggggagaggcggtttgcgtattgggcgctcttccgcttcctcgctcactgactcgctgcgctcggtcgttcggctgcggcgagcggtatcagctcactcaaaggcggtaatacggttatccacagaatcaggggataacgcaggaaagaacatgtgagcaaaaggccagcaaaaggccaggaaccgtaaaaaggccgcgttgctggcgtttttccataggctccgcccccctgacgagcatcacaaaaatcgacgctcaagtcagaggtggcgaaacccgacaggactataaagataccaggcgtttccccctggaagctccctcgtgcgctctcctgttccgaccctgccgcttaccggatacctgtccgcctttctcccttcgggaagcgtggcgctttctcatagctcacgctgtaggtatctcagttcggtgtaggtcgttcgctccaagctgggctgtgtgcacgaaccccccgttcagcccgaccgctgcgccttatccggtaactatcgtcttgagtccaacccggtaagacacgacttatcgccactggcagcagccactggtaacaggattagcagagcgaggtatgtaggcggtgctacagagttcttgaagtggtggcctaactacggctacactagaagaacagtatttggtatctgcgctctgctgaagccagttaccttcggaaaaagagttggtagctcttgatccggcaaacaaaccaccgctggtagcggtggtttttttgtttgcaagcagcagattacgcgcagaaaaaaaggatctcaagaagatcctttgatcttttctacggggtctgacgctcagtggaacgaaaactcacgttaagggattttggtcatgagattatcaaaaaggatcttcacctagatccttttgatccggaatta

SEQ ID NO: 49 - DNA, 15033 bp, Artificial Sequence
  Vector 24374
attcctgtggttggcatgcacatacaaatggacgaacggataaaccttttcacgcccttttaaatatccgattattctaataaacgctcttttctcttaggtttacccgccaatatatcctgtcaaacactgatagtttaaactggcactagcctaacggtgttgactaactaggccgcttccctaattagctaacccgggggcgcgccgggaccctaattagctaaggtacctgcagtgcagcgtgacccggtcgtgcccctctctagagataatgagcattgcatgtctaagttataaaaaattaccacatattttttttgtcacacttgtttgaagtgcagtttatctatctttatacatatatttaaactttactctacgaataatataatctatagtactacaataatatcagtgttttagagaatcatataaatgaacagttagacatggtctaaaggacaattgagtattttgacaacaggactctacagttttatctttttagtgtgcatgtgttctcctttttttttgcaaatagcttcacctatataatacttcatccattttattagtacatccatttagggtttagggttaatggtttttatagactaatttttttagtacatctattttattctattttagcctctaaattaagaaaactaaaactctattttagtttttttatttaataatttagatataaaatagaataaaataaagtgactaaaaattaaacaaataccctttaagaaattaaaaaaactaaggaaacatttttcttgtttcgagtagataatgccagcctgttaaacgccgtcgacgagtctaacggacaccaaccagcgaaccagcagcgtcgcgtcgggccaagcgaagcagacggcacggcatctctgtcgctgcctctggacccctctcgagagttccgctccaccgttggacttgctccgctgtcggcatccagaaattgcgtggcggagcggcagacgtgagccggcacggcaggcggcctcctcctcctctcacggcaccggcagctacgggggattcctttcccaccgctccttcgctttcccttcctcgcccgccgtaataaatagacaccccctccacaccctctttccccaacctcgtgttgttcggagcgcacacacacacaaccagatctcccccaaatccacccgtcggcacctccgcttcctaggtacgccgctcgtcctccccccccccccctctctaccttctctagatcggcgttccggtccatagttagggcccggtagttctacttctgttcatgtttgtgttagatccgtgtttgtgttagatccgtgctgctagcgttcgtacacggatgcgacctgtacgtcagacacgttctgattgctaacttgccagtgtttctctttggggaatcctgggatggctctagccgttccgcagacgggatcgatttcatgattttttttgtttcgttgcatagggtttggtttgcccttttcctttatttcaatatatgccgtgcacttgtttgtcgggtcatcttttcatgcttttttttgtcttggttgtgatgatgtggtctggttgggcggtcgttctagatcggagtagaattctgtttcaaactacctggtggatttattaattttggatctgtatgtgtgtgccatacatattcatagttacgaattgaagatgatggatggaaatatcgatctaggataggtatacatgttgatgcgggttttactgatgcatatacagagatgctttttgttcgcttggttgtgatgatgtggtgtggttgggcggtcgttcattcgttctagatcggagtagaatactgtttcaaactacctggtgtatttattaattttggaactgtatgtgtgtgtcatacatcttcatagttacgagtttaagatggatggaaatatcgatctaggataggtatacatgttgatgtgggttttactgatgcatatacatgatggcatatgcagcatctattcatatgctctaaccttgagtacctatctattataataaacaagtatgttttataattattttgatcttgatatacttggatgatggcatatccagcagctatatgtggatttttttagccctgccttcatacgctatttatttgcttggtactgtttcttttgtcgatgctcaccctgttgtttggtgttacttctgcaggatcctctaagtagcagccatggacaacaaccccaacatcaacgagtgcatcccctacaactgcctgagcaaccccgaggtggaggtgctgggcggcgagcgcatcgagaccggctacacccccatcgacatcagcctgagcctgacccagttcctgctgagcgagttcgtgcccggcgccggcttcgtgctgggcctggtggacatcatctggggcatcttcggccccagccagtgggacgccttcctggtgcagatcgagcagttgataaaccaacgcatagaggaattcgcccgcaaccaggccatcagccgcctggagggcctgagcaacctgtaccaaatctacgccgagagcttccgcgagtgggaggccgaccccaccaaccccgccctgcgcgaggagatgcgcatccagttcaacgacatgaacagcgccctgaccaccgccatccccctgttcgccgtgcagaactaccaggtgcccctgctgagcgtgtacgtgcaggccgccaacctgcacctgagcgtgctgcgcgacgtcagcgtgttcggccagcgctggggcttcgacgccgccaccatcaacagccgctacaacgacctgacccgcctgatcggcaactacaccgaccacgccgtgcgctggtacaacaccggcctggagcgcgtgtgggggcccgacagccgcgactggatcaggtacaaccagttccgccgcgagctgaccctgaccgtgctggacatcgtgagcctgttccccaactacgacagccgcacctaccccatccgcaccgtgagccagctgacccgcgagatttacaccaaccccgtgctggagaacttcgacggcagcttccgcggcagcgcccagggcatcgagggcagcatccgcagcccccacctgatggacatcctgaacagcatcaccatctacaccgacgcccaccgcggcgagtactactggagcggccaccagatcatggccagccccgtcggcttcagcggccccgagttcaccttccccctgtacggcacgatgggcaacgctgcacctcagcagcgcatcgtggcacagctgggccagggagtgtaccgcaccctgagcagcaccctgtaccgtcgacctttcaacatcggcatcaacaaccagcagctgagcgtgctggacggcaccgagttcgcctacggcaccagcagcaacctgcccagcgccgtgtaccgcaagagcggcaccgtggacagcctggacgagatcccccctcagaacaacaacgtgccacctcgacagggcttcagccaccgtctgagccacgtgagcatgttccgcagtggcttcagcaacagcagcgtgagcatcatccgtgcacctatgttcagctggattcaccgcagtgccgagttcaacaacatcatccccagcagccagatcacccagatccccctgaccaagagcaccaacctgggcagcggcaccagcgtggtgaagggccccggcttcaccggcggcgacatcctgcgccgcaccagccccggccagatcagcaccctgcgcgtgaacatcaccgcccccctgagccagcgctaccgcgtccgcatccgctacgccagcaccaccaacctgcagttccacaccagcatcgacggccgccccatcaaccagggcaacttcagcgccaccatgagcagcggcagcaacctgcagagcggcagcttccgcaccgtgggcttcaccacccccttcaacttcagcaacggcagcagcgtgttcaccctgagcgcccacgtgttcaacagcggcaacgaggtgtacatcgaccgcatcgagttcgtgcccgccgaggtgaccttcgaggccgagtacgacctggagagggctcagaaggccgtgaacgagctgttcaccagcagcaaccagatcggcctgaagaccgacgtgaccgactaccacatcgaccaggtgagcaacctggtggagtgcttaagcgacgagttctgcctggacgagaagaaggagctgagcgagaaggtgaagcacgccaagcgcctgagcgacgagcgcaacctgctgcaggaccccaacttccgcggcatcaaccgccagctggaccgcggctggcgaggcagcaccgatatcaccatccagggcggcgacgacgtgttcaaggagaactacgtgaccctgctgggcaccttcgacgagtgctaccccacctacctgtaccagaagatcgacgagagcaagctgaaggcctacacccgctaccagctgcgcggctacatcgaggacagccaggacctggaaatctacctgatccgctacaacgcgaagcacgagaccgtgaacgtgcccggcaccggcagcctgtggcccctgagcgcccccagccccatcggcaagtgcactagcacatccaacacgcacgagatgacagatagagcagtgagcagaccatctcttactagtcaccacagccaccacttcagcctggacatcgacgtgggctgcaccgacctgaacgaggacctgggcgtgtgggtgatcttcaagatcaagacccaggacggccacgcccgcctgggcaatctagagttcctggaggagaagcccctggtgggcgaggccctggcccgcgtgaagcgtgctgagaagaagtggcgcgacaagcgcgagaagctggagtgggagaccaacatcgtgtacaaggaggccaaggagagcgtggacgccctgttcgtgaacagccagtacgaccgcctgcaggccgacaccaacatcgccatgatccacgccgccgacaagcgcgtgcacagcattcgcgaggcctacctgcccgagctgagcgtgatccccggtgtgaacgccgccatcttcgaggaactcgagggccgcatctaggagctctatgatcgttcaaacatttggcaataaagtttcttaagattgaatcctgttgccggtcttgcgatgattatcatataatttctgttgaattacgttaagcatgtaataattaacatgtaatgcatgacgttatttatgagatgggtttttatgattagagtcccgcaattatacatttaatacgcgatagaaaacaaaatatagcgcgcaaactaggataaattatcgcgcgcggtgtcatctatgttactagatcaatagactacggaccgcgatcgcttaattaagcttgcatgcctgcagtgcagcgtgacccggtcgtgcccctctctagagataatgagcattgcatgtctaagttataaaaaattaccacatattttttttgtcacacttgtttgaagtgcagtttatctatctttatacatatatttaaactttactctacgaataatataatctatagtactacaataatatcagtgttttagagaatcatataaatgaacagttagacatggtctaaaggacaattgagtattttgacaacaggactctacagttttatctttttagtgtgcatgtgttctcctttttttttgcaaatagcttcacctatataatacttcatccattttattagtacatccatttagggtttagggttaatggtttttatagactaatttttttagtacatctattttattctattttagcctctaaattaagaaaactaaaactctattttagtttttttatttaataatttagatataaaatagaataaaataaagtgactaaaaattaaacaaataccctttaagaaattaaaaaaactaaggaaacatttttcttgtttcgagtagataatgccagcctgttaaacgccgccgacgagtctaacggacaccaaccagcgaaccagcagcgtcgcgtcgggccaagcgaagcagacggcacggcatctctgtcgctgcctctggacccctctcgagagttccgctccaccgttggacttgctccgctgtcggcatccagaaattgcgtggcggagcggcagacgtgagccggcacggcaggcggcctcctcctcctctcacggcaccggcagctacgggggattcctttcccaccgctccttcgctttcccttcctcgcccgccgtaataaatagacaccccctccacaccctctttccccaacctcgtgttgttcggagcgcacacacacacaaccagatctcccccaaatccacccgtcggcacctccgcttcaaggtacgccgctcgtcctccccccccccccctctctaccttctctagatcggcgttccggtccatagttagggcccggtagttctacttctgttcatgtttgtgttagatccgtgtttgtgttagatccgtgctgttagcgttcgtacacggatgcgacctgtacgtcagacacgttctgattgctaacttgccagtgtttctctttggggaatcctgggatggctctagccgttccgcagacgggatcgatttcatgattttttttgtttcgttgcatagggtttggtttgcccttttcctttatttcaatatatgccgtgcacttgtttgtcgggtcatcttttcatgcttttttttgtcttggttgtgatgatgtggtctggttgggcggtcgttctagatcggagtagaattctgtttcaaactacctggtggatttattaattttggatctgtatgtgtgtgccatacatattcatagttacgaattgaagatgatggatggaaatatcgatctaggataggtatacatgttgatgcgggttttactgatgcatatacagagatgctttttgttcgcttggttgtgatgatgtggtgtggttgggcggtcgttcattcgttctagatcggagtagaatactgtttcaaactacctggtgtatttattaattttggaactgtatgtgtgtgtcatacatcttcatagttacgagtttaagatggatggaaatatcgatctaggataggtatacatgttgatgtgggttttactgatgcatatacatgatggcatatgcagcatctattcatatgctctaaccttgagtacctatctattataataaacaagtatgttttataattattttgatcttgatatacttggatgatggcatatgcagcagctatatgtggatttttttagccctgccttcatacgctatttatttgcttggtactgtttcttttgtcgatgctcaccctgttgtttggtgttacttctgcagggatctccgatcatgcaaaaactcattaactcagtgcaaaactatgcctggggcagcaaaacggcgttgactgaactttatggtatggaaaatccgtccagccagccgatggccgagctgtggatgggcgcacatccgaaaagcagttcacgagtgcagaatgccgccggagatatcgtttcactgcgtgatgtgattgagagtgataaatcgactctgctcggagaggccgttgccaaacgctttggcgaactgcctttcctgttcaaagtattatgcgcagcacagccactctccattcaggttcatccaaacaaacacaattctgaaatcggttttgccaaagaaaatgccgcaggtatcccgatggatgccgccgagcgtaactataaagatcctaaccacaagccggagctggtttttgcgctgacgcctttccttgcgatgaacgcgtttcgtgaattttccgagattgtctccctactccagccggtcgcaggtgcacatccggcgattgctcactttttacaacagcctgatgccgaacgtttaagcgaactgttcgccagcctgttgaatatgcagggtgaagaaaaatcccgcgcgctggcgattttaaaatcggccctcgatagccagcagggtgaaccgtggcaaacgattcgtttaatttctgaattttacccggaagacagcggtctgttctccccgctattgctgaatgtggtgaaattgaaccctggcgaagcgatgttcctgttcgctgaaacaccgcacgcttacctgcaaggcgtggcgctggaagtgatggcaaactccgataacgtgctgcgtgcgggtctgacgcctaaatacattgatattccggaactggttgccaatgtgaaattcgaagccaaaccggctaaccagttgttgacccagccggtgaaacaaggtgcagaactggacttcccgattccagtggatgattttgccttctcgctgcatgaccttagtgataaagaaaccaccattagccagcagagtgccgccattttgttctgcgtcgaaggcgatgcaacgttgtggaaaggttctcagcagttacagcttaaaccgggtgaatcagcgtttattgccgccaacgaatcaccggtgactgtcaaaggccacggccgtttagcgcgtgtttacaacaagctgtaagagcttactgaaaaaattaacatctcttgctaagctgggtcatgggtcgtttaagctgccgatgtgcctgcgtcgtctggtgccctctctccatatggaggttgtcaaagtatctgctgttcgtgtcatgagtcgtgtcagtgttggtttaataatggaccggttgtgttgtgtgtgcgtactacccagaactatgacaaatcatgaataagtttgatgtttgaaattaaagcctgtgctcattatgttctgtctttcagttgtctcctaatatttgcctccaggtactggctatctaccgtttcttacttaggaggtgtttgaatgcactaaaactaatagttagtggctaaaattagttaaaacatccaaacaccatagctaatagttgaactattagctatttttggaaaattagttaatagtgaggtagttatttgttagctagctaattcaactaacaatttttagccaactaacaattagtttcagtgcattcaaacacccccttaatgttaacgtggttctatctaccgtctcctaatatatggttgattgttcggtttgttgctatgctattgggttctgattgctgctagttcttgctgaatccagaagttctcgtagtatagctcagattcatattatttatttgagtgataagtgatccaggttattactatgttagctaggttttttttacaaggataaattatctgtgatcataattcttatgaaagctttatgtttcctggaggcagtggcatgcaatgcatgacagcaacttgatcacaccagctgaggtagatacggtaacaaggttcttaaatctgttcaccaaatcattggagaacacacatacacattcttgccagtcttggttagagaaatttcatgacaaaatgccaaagctgtcttgactcttcacttttggccatgagtcgtgacttagtttggtttaatggaccggttctcctagcttgttctactcaaaactgttgttgatgcgaataagttgtgatggttgatctctggattttgttttgctctcaatagtggacgagattagatagcctgcaggcccgggggcgcgccctaattagctaacggccaggatcgccgcgtgagcctttagcaactagctagattaattaacgcaatctgttattaagttgtctaagcgtcaatttgtttacaccacaatatatcctgccaccagccagccaacagctccccgaccggcagctcggcacaaaatcaccactcgatacaggcagcccatcagaattaattctcatgtttgacagcttatcatcgactgcacggtgcaccaatgcttctggcgtcaggcagccatcggaagctgtggtatggctgtgcaggtcgtaaatcactgcataattcgtgtcgctcaaggcgcactcccgttctggataatgttttttgcgccgacatcataacggttctggcaaatattctgaaatgagctgttgacaattaatcatccggctcgtataatgtgtggaattgtgagcggataacaatttcacacaggaaacagaccatgagggaagcgttgatcgccgaagtatcgactcaactatcagaggtagttggcgtcatcgagcgccatctcgaaccgacgttgctggccgtacatttgtacggctccgcagtggatggcggcctgaagccacacagtgatattgatttgctggttacggtgaccgtaaggcttgatgaaacaacgcggcgagctttgatcaacgaccttttggaaacttcggcttcccctggagagagcgagattctccgcgctgtagaagtcaccattgttgtgcacgacgacatcattccgtggcgttatccagctaagcgcgaactgcaatttggagaatggcagcgcaatgacattcttgcaggtatcttcgagccagccacgatcgacattgatctggctatcttgctgacaaaagcaagagaacatagcgttgccttggtaggtccagcggcggaggaactctttgatccggttcctgaacaggatctatttgaggcgctaaatgaaaccttaacgctatggaactcgccgcccgactgggctggcgatgagcgaaatgtagtgcttacgttgtcccgcatttggtacagcgcagtaaccggcaaaatcgcgccgaaggatgtcgctgccgactgggcaatggagcgcctgccggcccagtatcagcccgtcatacttgaagctaggcaggcttatcttggacaagaagatcgcttggcctcgcgcgcagatcagttggaagaatttgttcactacgtgaaaggcgagatcaccaaagtagtcggcaaataaagctctagtggatctccgtacccagggatctggctcgcggcggacgcacgacgccggggcgagaccataggcgatctcctaaatcaatagtagctgtaacctcgaagcgtttcacttgtaacaacgattgagaatttttgtcataaaattgaaatacttggttcgcatttttgtcatccgcggtcagccgcaattctgacgaactgcccatttagctggagatgattgtacatccttcacgtgaaaatttctcaagcgctgtgaacaagggttcagattttagattgaaaggtgagccgttgaaacacgttcttcttgtcgatgacgacgtcgctatgcggcatcttattattgaataccttacgatccacgccttcaaagtgaccgcggtagccgacagcacccagttcacaagagtactctcttccgcgacggtcgatgtcgtggttgttgatctagatttaggtcgtgaagatgggctcgagatcgttcgtaatctggcggcaaagtctgatattccaatcataattatcagtggcgaccgccttgaggagacggataaagttgttgcactcgagctaggagcaagtgattttatcgctaagccgttcagtatcagagagtttctagcacgcattcgggttgccttgcgcgtgcgccccaacgttgtccgctccaaagaccgacggtctttttgttttactgactggacacttaatctcaggcaacgtcgcttgatgtccgaagctggcggtgaggtgaaacttacggcaggtgagttcaatcttctcctcgcgtttttagagaaaccccgcgacgttctatcgcgcgagcaacttctcattgccagtcgagtacgcgacgaggaggtttatgacaggagtatagatgttctcattttgaggctgcgccgcaaacttgaggcagatccgtcaagccctcaactgataaaaacagcaagaggtgccggttatttctttgacgcggacgtgcaggtttcgcacggggggacgatggcagcctgagccaattcccagatccccgaggaatcggcgtgagcggtcgcaaaccatccggcccggtacaaatcggcgcggcgctgggtgatgacctggtggagaagttgaaggccgcgcaggccgcccagcggcaacgcatcgaggcagaagcacgccccggtgaatcgtggcaagcggccgctgatcgaatccgcaaagaatcccggcaaccgccggcagccggtgcgccgtcgattaggaagccgcccaagggcgacgagcaaccagattttttcgttccgatgctctatgacgtgggcacccgcgatagtcgcagcatcatggacgtggccgttttccgtctgtcgaagcgtgaccgacgagctggcgaggtgatccgctacgagcttccagacgggcacgtagaggtttccgcagggccggccggcatggccagtgtgtgggattacgacctggtactgatggcggtttcccatctaaccgaatccatgaaccgataccgggaagggaagggagacaagcccggccgcgtgttccgtccacacgttgcggacgtactcaagttctgccggcgagccgatggcggaaagcagaaagacgacctggtagaaacctgcattcggttaaacaccacgcacgttgccatgcagcgtacgaagaaggccaagaacggccgcctggtgacggtatccgagggtgaagccttgattagccgctacaagatcgtaaagagcgaaaccgggcggccggagtacatcgagatcgagctggctgattggatgtaccgcgagatcacagaaggcaagaacccggacgtgctgacggttcaccccgattactttttgatcgatcccggcatcggccgttttctctaccgcctggcacgccgcgccgcaggcaaggcagaagccagatggttgttcaagacgatctacgaacgcagtggcagcgccggagagttcaagaagttctgtttcaccgtgcgcaagctgatcgggtcaaatgacctgccggagtacgatttgaaggaggaggcggggcaggctggcccgatcctagtcatgcgctaccgcaacctgatcgagggcgaagcatccgccggttcctaatgtacggagcagatgctagggcaaattgccctagcaggggaaaaaggtcgaaaaggtctctttcctgtggatagcacgtacattgggaacccaaagccgtacattgggaaccggaacccgtacattgggaacccaaagccgtacattgggaaccggtcacacatgtaagtgactgatataaaagagaaaaaaggcgatttttccgcctaaaactctttaaaacttattaaaactcttaaaacccgcctggcctgtgcataactgtctggccagcgcacagccgaagagctgcaaaaagcgcctacccttcggtcgctgcgctccctacgccccgccgcttcgcgtcggcctatcgcggccgctggccgctcaaaaatggctggcctacggccaggcaatctaccagggcgcggacaagccgcgccgtcgccactcgaccgccggcgctgaggtctgcctcgtgaagaaggtgttgctgactcataccaggcctgaatcgccccatcatccagccagaaagtgagggagccacggttgatgagagctttgttgtaggtggaccagttggtgattttgaacttttgctttgccacggaacggtctgcgttgtcgggaagatgcgtgatctgatccttcaactcagcaaaagttcgatttattcaacaaagccgccgtcccgtcaagtcagcgtaatgctctgccagtgttacaaccaattaaccaattctgattagaaaaactcatcgagcatcaaatgaaactgcaatttattcatatcaggattatcaataccatatttttgaaaaagccgtttctgtaatgaaggagaaaactcaccgaggcagttccataggatggcaagatcctggtatcggtctgcgattccgactcgtccaacatcaatacaacctattaatttcccctcgtcaaaaataaggttatcaagtgagaaatcaccatgagtgacgactgaatccggtgagaatggcaaaagctctgcattaatgaatcggccaacgcgcggggagaggcggtttgcgtattgggcgctcttccgcttcctcgctcactgactcgctgcgctcggtcgttcggctgcggcgagcggtatcagctcactcaaaggcggtaatacggttatccacagaatcaggggataacgcaggaaagaacatgtgagcaaaaggccagcaaaaggccaggaaccgtaaaaaggccgcgttgctggcgtttttccataggctccgcccccctgacgagcatcacaaaaatcgacgctcaagtcagaggtggcgaaacccgacaggactataaagataccaggcgtttccccctggaagctccctcgtgcgctctcctgttccgaccctgccgcttaccggatacctgtccgcctttctcccttcgggaagcgtggcgctttctcatagctcacgctgtaggtatctcagttcggtgtaggtcgttcgctccaagctgggctgtgtgcacgaaccccccgttcagcccgaccgctgcgccttatccggtaactatcgtcttgagtccaacccggtaagacacgacttatcgccactggcagcagccactggtaacaggattagcagagcgaggtatgtaggcggtgctacagagttcttgaagtggtggcctaactacggctacactagaagaacagtatttggtatctgcgctctgctgaagccagttaccttcggaaaaagagttggtagctcttgatccggcaaacaaaccaccgctggtagcggtggtttttttgtttgcaagcagcagattacgcgcagaaaaaaaggatctcaagaagatcctttgatcttttctacggggtctgacgctcagtggaacgaaaactcacgttaagggattttggtcatgagattatcaaaaaggatcttcacctagatccttttgatccggaatta

SEQ ID NO: 50 - DNA, 15030 bp, Artificial Sequence
  Vector 24375
attcctgtggttggcatgcacatacaaatggacgaacggataaaccttttcacgcccttttaaatatccgattattctaataaacgctcttttctcttaggtttacccgccaatatatcctgtcaaacactgatagtttaaactggcactagcctaacggtgttgactaactaggccgcttccctaattagctaacccgggggcgcgccgggaccctaattagctaaggtacctgcagtgcagcgtgacccggtcgtgcccctctctagagataatgagcattgcatgtctaagttataaaaaattaccacatattttttttgtcacacttgtttgaagtgcagtttatctatctttatacatatatttaaactttactctacgaataatataatctatagtactacaataatatcagtgttttagagaatcatataaatgaacagttagacatggtctaaaggacaattgagtattttgacaacaggactctacagttttatctttttagtgtgcatgtgttctcctttttttttgcaaatagcttcacctatataatacttcatccattttattagtacatccatttagggtttagggttaatggtttttatagactaatttttttagtacatctattttattctattttagcctctaaattaagaaaactaaaactctattttagtttttttatttaataatttagatataaaatagaataaaataaagtgactaaaaattaaacaaataccctttaagaaattaaaaaaactaaggaaacatttttcttgtttcgagtagataatgccagcctgttaaacgccgtcgacgagtctaacggacaccaaccagcgaaccagcagcgtcgcgtcgggccaagcgaagcagacggcacggcatctctgtcgctgcctctggacccctctcgagagttccgctccaccgttggacttgctccgctgtcggcatccagaaattgcgtggcggagcggcagacgtgagccggcacggcaggcggcctcctcctcctctcacggcaccggcagctacgggggattcctttcccaccgctccttcgctttcccttcctcgcccgccgtaataaatagacaccccctccacaccctctttccccaacctcgtgttgttcggagcgcacacacacacaaccagatctcccccaaatccacccgtcggcacctccgcttcctaggtacgccgctcgtcctccccccccccccctctctaccttctctagatcggcgttccggtccatagttagggcccggtagttctacttctgttcatgtttgtgttagatccgtgtttgtgttagatccgtgctgctagcgttcgtacacggatgcgacctgtacgtcagacacgttctgattgctaacttgccagtgtttctctttggggaatcctgggatggctctagccgttccgcagacgggatcgatttcatgattttttttgtttcgttgcatagggtttggtttgcccttttcctttatttcaatatatgccgtgcacttgtttgtcgggtcatcttttcatgcttttttttgtcttggttgtgatgatgtggtctggttgggcggtcgttctagatcggagtagaattctgtttcaaactacctggtggatttattaattttggatctgtatgtgtgtgccatacatattcatagttacgaattgaagatgatggatggaaatatcgatctaggataggtatacatgttgatgcgggttttactgatgcatatacagagatgctttttgttcgcttggttgtgatgatgtggtgtggttgggcggtcgttcattcgttctagatcggagtagaatactgtttcaaactacctggtgtatttattaattttggaactgtatgtgtgtgtcatacatcttcatagttacgagtttaagatggatggaaatatcgatctaggataggtatacatgttgatgtgggttttactgatgcatatacatgatggcatatgcagcatctattcatatgctctaaccttgagtacctatctattataataaacaagtatgttttataattattttgatcttgatatacttggatgatggcatatccagcagctatatgtggatttttttagccctgccttcatacgctatttatttgcttggtactgtttcttttgtcgatgctcaccctgttgtttggtgttacttctgcaggatcctctaagtagcagccatggacaacaaccccaacatcaacgagtgcatcccctacaactgcctgagcaaccccgaggtggaggtgctgggcggcgagcgcatcgagaccggctacacccccatcgacatcagcctgagcctgacccagttcctgctgagcgagttcgtgcccggcgccggcttcgtgctgggcctggtggacatcatctggggcatcttcggccccagccagtgggacgccttcctggtgcagatcgagcagttgataaaccaacgcatagaggaattcgcccgcaaccaggccatcagccgcctggagggcctgagcaacctgtaccaaatctacgccgagagcttccgcgagtgggaggccgaccccaccaaccccgccctgcgcgaggagatgcgcatccagttcaacgacatgaacagcgccctgaccaccgccatccccctgttcgccgtgcagaactaccaggtgcccctgctgagcgtgtacgtgcaggccgccaacctgcacctgagcgtgctgcgcgacgtcagcgtgttcggccagcgctggggcttcgacgccgccaccatcaacagccgctacaacgacctgacccgcctgatcggcaactacaccgaccacgccgtgcgctggtacaacaccggcctggagcgcgtgtgggggcccgacagccgcgactggatcaggtacaaccagttccgccgcgagctgaccctgaccgtgctggacatcgtgagcctgttccccaactacgacagccgcacctaccccatccgcaccgtgagccagctgacccgcgagatttacaccaaccccgtgctggagaacttcgacggcagcttccgcggcagcgcccagggcatcgagggcagcatccgcagcccccacctgatggacatcctgaacagcatcaccatctacaccgacgcccaccgcggcgagtactactggagcggccaccagatcatggccagccccgtcggcttcagcggccccgagttcaccttccccctgtacggcacgatgggcaacgctgcacctcagcagcgcatcgtggcacagctgggccagggagtgtaccgcaccctgagcagcaccctgtaccgtcgacctttcaacatcggcatcaacaaccagcagctgagcgtgctggacggcaccgagttcgcctacggcaccagcagcaacctgcccagcgccgtgtaccgcaagagcggcaccgtggacagcctggacgagatcccccctcagaacaacaacgtgccacctcgacagggcttcagccaccgtctgagccacgtgagcatgttccgcagtggcttcagcaacagcagcgtgagcatcatccgtgcacctatgttcagctggattcaccgcagtgccgagttcaacaacatcatccccagcagccagatcacccagatccccctgaccaagagcaccaacctgggcagcggcaccagcgtggtgaagggccccggcttcaccggcggcgacatcctgcgccgcaccagccccggccagatcagcaccctgcgcgtgaacatcaccgcccccctgagccagcgctaccgcgtccgcatccgctacgccagcaccaccaacctgcagttccacaccagcatcgacggccgccccatcaaccagggcaacttcagcgccaccatgagcagcggcagcaacctgcagagcggcagcttccgcaccgtgggcttcaccacccccttcaacttcagcaacggcagcagcgtgttcaccctgagcgcccacgtgttcaacagcggcaacgaggtgtacatcgaccgcatcgagttcgtgcccgccgaggtgaccttcgaggccgagtacgacctggagagggctcagaaggccgtgaacgagctgttcaccagcagcaaccagatcggcctgaagaccgacgtgaccgactaccacatcgaccaggtgagcaacctggtggagtgcttaagcgacgagttctgcctggacgagaagaaggagctgagcgagaaggtgaagcacgccaagcgcctgagcgacgagcgcaacctgctgcaggaccccaacttccgcggcatcaaccgccagctggaccgcggctggcgaggcagcaccgatatcaccatccagggcggcgacgacgtgttcaaggagaactacgtgaccctgctgggcaccttcgacgagtgctaccccacctacctgtaccagaagatcgacgagagcaagctgaaggcctacacccgctaccagctgcgcggctacatcgaggacagccaggacctggaaatctacctgatccgctacaacgcgaagcacgagaccgtgaacgtgcccggcaccggcagcctgtggcccctgagcgcccccagccccatcggcaagtgcactagcatctctgttgcctttttgattgaaccgtgccaacagcttgttggatttactagtcaccacagccaccacttcagcctggacatcgacgtgggctgcaccgacctgaacgaggacctgggcgtgtgggtgatcttcaagatcaagacccaggacggccacgcccgcctgggcaatctagagttcctggaggagaagcccctggtgggcgaggccctggcccgcgtgaagcgtgctgagaagaagtggcgcgacaagcgcgagaagctggagtgggagaccaacatcgtgtacaaggaggccaaggagagcgtggacgccctgttcgtgaacagccagtacgaccgcctgcaggccgacaccaacatcgccatgatccacgccgccgacaagcgcgtgcacagcattcgcgaggcctacctgcccgagctgagcgtgatccccggtgtgaacgccgccatcttcgaggaactcgagggccgcatctaggagctctatgatcgttcaaacatttggcaataaagtttcttaagattgaatcctgttgccggtcttgcgatgattatcatataatttctgttgaattacgttaagcatgtaataattaacatgtaatgcatgacgttatttatgagatgggtttttatgattagagtcccgcaattatacatttaatacgcgatagaaaacaaaatatagcgcgcaaactaggataaattatcgcgcgcggtgtcatctatgttactagatcaatagactacggaccgcgatcgcttaattaagcttgcatgcctgcagtgcagcgtgacccggtcgtgcccctctctagagataatgagcattgcatgtctaagttataaaaaattaccacatattttttttgtcacacttgtttgaagtgcagtttatctatctttatacatatatttaaactttactctacgaataatataatctatagtactacaataatatcagtgttttagagaatcatataaatgaacagttagacatggtctaaaggacaattgagtattttgacaacaggactctacagttttatctttttagtgtgcatgtgttctcctttttttttgcaaatagcttcacctatataatacttcatccattttattagtacatccatttagggtttagggttaatggtttttatagactaatttttttagtacatctattttattctattttagcctctaaattaagaaaactaaaactctattttagtttttttatttaataatttagatataaaatagaataaaataaagtgactaaaaattaaacaaataccctttaagaaattaaaaaaactaaggaaacatttttcttgtttcgagtagataatgccagcctgttaaacgccgccgacgagtctaacggacaccaaccagcgaaccagcagcgtcgcgtcgggccaagcgaagcagacggcacggcatctctgtcgctgcctctggacccctctcgagagttccgctccaccgttggacttgctccgctgtcggcatccagaaattgcgtggcggagcggcagacgtgagccggcacggcaggcggcctcctcctcctctcacggcaccggcagctacgggggattcctttcccaccgctccttcgctttcccttcctcgcccgccgtaataaatagacaccccctccacaccctctttccccaacctcgtgttgttcggagcgcacacacacacaaccagatctcccccaaatccacccgtcggcacctccgcttcaaggtacgccgctcgtcctccccccccccccctctctaccttctctagatcggcgttccggtccatagttagggcccggtagttctacttctgttcatgtttgtgttagatccgtgtttgtgttagatccgtgctgttagcgttcgtacacggatgcgacctgtacgtcagacacgttctgattgctaacttgccagtgtttctctttggggaatcctgggatggctctagccgttccgcagacgggatcgatttcatgattttttttgtttcgttgcatagggtttggtttgcccttttcctttatttcaatatatgccgtgcacttgtttgtcgggtcatcttttcatgcttttttttgtcttggttgtgatgatgtggtctggttgggcggtcgttctagatcggagtagaattctgtttcaaactacctggtggatttattaattttggatctgtatgtgtgtgccatacatattcatagttacgaattgaagatgatggatggaaatatcgatctaggataggtatacatgttgatgcgggttttactgatgcatatacagagatgctttttgttcgcttggttgtgatgatgtggtgtggttgggcggtcgttcattcgttctagatcggagtagaatactgtttcaaactacctggtgtatttattaattttggaactgtatgtgtgtgtcatacatcttcatagttacgagtttaagatggatggaaatatcgatctaggataggtatacatgttgatgtgggttttactgatgcatatacatgatggcatatgcagcatctattcatatgctctaaccttgagtacctatctattataataaacaagtatgttttataattattttgatcttgatatacttggatgatggcatatgcagcagctatatgtggatttttttagccctgccttcatacgctatttatttgcttggtactgtttcttttgtcgatgctcaccctgttgtttggtgttacttctgcagggatctccgatcatgcaaaaactcattaactcagtgcaaaactatgcctggggcagcaaaacggcgttgactgaactttatggtatggaaaatccgtccagccagccgatggccgagctgtggatgggcgcacatccgaaaagcagttcacgagtgcagaatgccgccggagatatcgtttcactgcgtgatgtgattgagagtgataaatcgactctgctcggagaggccgttgccaaacgctttggcgaactgcctttcctgttcaaagtattatgcgcagcacagccactctccattcaggttcatccaaacaaacacaattctgaaatcggttttgccaaagaaaatgccgcaggtatcccgatggatgccgccgagcgtaactataaagatcctaaccacaagccggagctggtttttgcgctgacgcctttccttgcgatgaacgcgtttcgtgaattttccgagattgtctccctactccagccggtcgcaggtgcacatccggcgattgctcactttttacaacagcctgatgccgaacgtttaagcgaactgttcgccagcctgttgaatatgcagggtgaagaaaaatcccgcgcgctggcgattttaaaatcggccctcgatagccagcagggtgaaccgtggcaaacgattcgtttaatttctgaattttacccggaagacagcggtctgttctccccgctattgctgaatgtggtgaaattgaaccctggcgaagcgatgttcctgttcgctgaaacaccgcacgcttacctgcaaggcgtggcgctggaagtgatggcaaactccgataacgtgctgcgtgcgggtctgacgcctaaatacattgatattccggaactggttgccaatgtgaaattcgaagccaaaccggctaaccagttgttgacccagccggtgaaacaaggtgcagaactggacttcccgattccagtggatgattttgccttctcgctgcatgaccttagtgataaagaaaccaccattagccagcagagtgccgccattttgttctgcgtcgaaggcgatgcaacgttgtggaaaggttctcagcagttacagcttaaaccgggtgaatcagcgtttattgccgccaacgaatcaccggtgactgtcaaaggccacggccgtttagcgcgtgtttacaacaagctgtaagagcttactgaaaaaattaacatctcttgctaagctgggtcatgggtcgtttaagctgccgatgtgcctgcgtcgtctggtgccctctctccatatggaggttgtcaaagtatctgctgttcgtgtcatgagtcgtgtcagtgttggtttaataatggaccggttgtgttgtgtgtgcgtactacccagaactatgacaaatcatgaataagtttgatgtttgaaattaaagcctgtgctcattatgttctgtctttcagttgtctcctaatatttgcctccaggtactggctatctaccgtttcttacttaggaggtgtttgaatgcactaaaactaatagttagtggctaaaattagttaaaacatccaaacaccatagctaatagttgaactattagctatttttggaaaattagttaatagtgaggtagttatttgttagctagctaattcaactaacaatttttagccaactaacaattagtttcagtgcattcaaacacccccttaatgttaacgtggttctatctaccgtctcctaatatatggttgattgttcggtttgttgctatgctattgggttctgattgctgctagttcttgctgaatccagaagttctcgtagtatagctcagattcatattatttatttgagtgataagtgatccaggttattactatgttagctaggttttttttacaaggataaattatctgtgatcataattcttatgaaagctttatgtttcctggaggcagtggcatgcaatgcatgacagcaacttgatcacaccagctgaggtagatacggtaacaaggttcttaaatctgttcaccaaatcattggagaacacacatacacattcttgccagtcttggttagagaaatttcatgacaaaatgccaaagctgtcttgactcttcacttttggccatgagtcgtgacttagtttggtttaatggaccggttctcctagcttgttctactcaaaactgttgttgatgcgaataagttgtgatggttgatctctggattttgttttgctctcaatagtggacgagattagatagcctgcaggcccgggggcgcgccctaattagctaacggccaggatcgccgcgtgagcctttagcaactagctagattaattaacgcaatctgttattaagttgtctaagcgtcaatttgtttacaccacaatatatcctgccaccagccagccaacagctccccgaccggcagctcggcacaaaatcaccactcgatacaggcagcccatcagaattaattctcatgtttgacagcttatcatcgactgcacggtgcaccaatgcttctggcgtcaggcagccatcggaagctgtggtatggctgtgcaggtcgtaaatcactgcataattcgtgtcgctcaaggcgcactcccgttctggataatgttttttgcgccgacatcataacggttctggcaaatattctgaaatgagctgttgacaattaatcatccggctcgtataatgtgtggaattgtgagcggataacaatttcacacaggaaacagaccatgagggaagcgttgatcgccgaagtatcgactcaactatcagaggtagttggcgtcatcgagcgccatctcgaaccgacgttgctggccgtacatttgtacggctccgcagtggatggcggcctgaagccacacagtgatattgatttgctggttacggtgaccgtaaggcttgatgaaacaacgcggcgagctttgatcaacgaccttttggaaacttcggcttcccctggagagagcgagattctccgcgctgtagaagtcaccattgttgtgcacgacgacatcattccgtggcgttatccagctaagcgcgaactgcaatttggagaatggcagcgcaatgacattcttgcaggtatcttcgagccagccacgatcgacattgatctggctatcttgctgacaaaagcaagagaacatagcgttgccttggtaggtccagcggcggaggaactctttgatccggttcctgaacaggatctatttgaggcgctaaatgaaaccttaacgctatggaactcgccgcccgactgggctggcgatgagcgaaatgtagtgcttacgttgtcccgcatttggtacagcgcagtaaccggcaaaatcgcgccgaaggatgtcgctgccgactgggcaatggagcgcctgccggcccagtatcagcccgtcatacttgaagctaggcaggcttatcttggacaagaagatcgcttggcctcgcgcgcagatcagttggaagaatttgttcactacgtgaaaggcgagatcaccaaagtagtcggcaaataaagctctagtggatctccgtacccagggatctggctcgcggcggacgcacgacgccggggcgagaccataggcgatctcctaaatcaatagtagctgtaacctcgaagcgtttcacttgtaacaacgattgagaatttttgtcataaaattgaaatacttggttcgcatttttgtcatccgcggtcagccgcaattctgacgaactgcccatttagctggagatgattgtacatccttcacgtgaaaatttctcaagcgctgtgaacaagggttcagattttagattgaaaggtgagccgttgaaacacgttcttcttgtcgatgacgacgtcgctatgcggcatcttattattgaataccttacgatccacgccttcaaagtgaccgcggtagccgacagcacccagttcacaagagtactctcttccgcgacggtcgatgtcgtggttgttgatctagatttaggtcgtgaagatgggctcgagatcgttcgtaatctggcggcaaagtctgatattccaatcataattatcagtggcgaccgccttgaggagacggataaagttgttgcactcgagctaggagcaagtgattttatcgctaagccgttcagtatcagagagtttctagcacgcattcgggttgccttgcgcgtgcgccccaacgttgtccgctccaaagaccgacggtctttttgttttactgactggacacttaatctcaggcaacgtcgcttgatgtccgaagctggcggtgaggtgaaacttacggcaggtgagttcaatcttctcctcgcgtttttagagaaaccccgcgacgttctatcgcgcgagcaacttctcattgccagtcgagtacgcgacgaggaggtttatgacaggagtatagatgttctcattttgaggctgcgccgcaaacttgaggcagatccgtcaagccctcaactgataaaaacagcaagaggtgccggttatttctttgacgcggacgtgcaggtttcgcacggggggacgatggcagcctgagccaattcccagatccccgaggaatcggcgtgagcggtcgcaaaccatccggcccggtacaaatcggcgcggcgctgggtgatgacctggtggagaagttgaaggccgcgcaggccgcccagcggcaacgcatcgaggcagaagcacgccccggtgaatcgtggcaagcggccgctgatcgaatccgcaaagaatcccggcaaccgccggcagccggtgcgccgtcgattaggaagccgcccaagggcgacgagcaaccagattttttcgttccgatgctctatgacgtgggcacccgcgatagtcgcagcatcatggacgtggccgttttccgtctgtcgaagcgtgaccgacgagctggcgaggtgatccgctacgagcttccagacgggcacgtagaggtttccgcagggccggccggcatggccagtgtgtgggattacgacctggtactgatggcggtttcccatctaaccgaatccatgaaccgataccgggaagggaagggagacaagcccggccgcgtgttccgtccacacgttgcggacgtactcaagttctgccggcgagccgatggcggaaagcagaaagacgacctggtagaaacctgcattcggttaaacaccacgcacgttgccatgcagcgtacgaagaaggccaagaacggccgcctggtgacggtatccgagggtgaagccttgattagccgctacaagatcgtaaagagcgaaaccgggcggccggagtacatcgagatcgagctggctgattggatgtaccgcgagatcacagaaggcaagaacccggacgtgctgacggttcaccccgattactttttgatcgatcccggcatcggccgttttctctaccgcctggcacgccgcgccgcaggcaaggcagaagccagatggttgttcaagacgatctacgaacgcagtggcagcgccggagagttcaagaagttctgtttcaccgtgcgcaagctgatcgggtcaaatgacctgccggagtacgatttgaaggaggaggcggggcaggctggcccgatcctagtcatgcgctaccgcaacctgatcgagggcgaagcatccgccggttcctaatgtacggagcagatgctagggcaaattgccctagcaggggaaaaaggtcgaaaaggtctctttcctgtggatagcacgtacattgggaacccaaagccgtacattgggaaccggaacccgtacattgggaacccaaagccgtacattgggaaccggtcacacatgtaagtgactgatataaaagagaaaaaaggcgatttttccgcctaaaactctttaaaacttattaaaactcttaaaacccgcctggcctgtgcataactgtctggccagcgcacagccgaagagctgcaaaaagcgcctacccttcggtcgctgcgctccctacgccccgccgcttcgcgtcggcctatcgcggccgctggccgctcaaaaatggctggcctacggccaggcaatctaccagggcgcggacaagccgcgccgtcgccactcgaccgccggcgctgaggtctgcctcgtgaagaaggtgttgctgactcataccaggcctgaatcgccccatcatccagccagaaagtgagggagccacggttgatgagagctttgttgtaggtggaccagttggtgattttgaacttttgctttgccacggaacggtctgcgttgtcgggaagatgcgtgatctgatccttcaactcagcaaaagttcgatttattcaacaaagccgccgtcccgtcaagtcagcgtaatgctctgccagtgttacaaccaattaaccaattctgattagaaaaactcatcgagcatcaaatgaaactgcaatttattcatatcaggattatcaataccatatttttgaaaaagccgtttctgtaatgaaggagaaaactcaccgaggcagttccataggatggcaagatcctggtatcggtctgcgattccgactcgtccaacatcaatacaacctattaatttcccctcgtcaaaaataaggttatcaagtgagaaatcaccatgagtgacgactgaatccggtgagaatggcaaaagctctgcattaatgaatcggccaacgcgcggggagaggcggtttgcgtattgggcgctcttccgcttcctcgctcactgactcgctgcgctcggtcgttcggctgcggcgagcggtatcagctcactcaaaggcggtaatacggttatccacagaatcaggggataacgcaggaaagaacatgtgagcaaaaggccagcaaaaggccaggaaccgtaaaaaggccgcgttgctggcgtttttccataggctccgcccccctgacgagcatcacaaaaatcgacgctcaagtcagaggtggcgaaacccgacaggactataaagataccaggcgtttccccctggaagctccctcgtgcgctctcctgttccgaccctgccgcttaccggatacctgtccgcctttctcccttcgggaagcgtggcgctttctcatagctcacgctgtaggtatctcagttcggtgtaggtcgttcgctccaagctgggctgtgtgcacgaaccccccgttcagcccgaccgctgcgccttatccggtaactatcgtcttgagtccaacccggtaagacacgacttatcgccactggcagcagccactggtaacaggattagcagagcgaggtatgtaggcggtgctacagagttcttgaagtggtggcctaactacggctacactagaagaacagtatttggtatctgcgctctgctgaagccagttaccttcggaaaaagagttggtagctcttgatccggcaaacaaaccaccgctggtagcggtggtttttttgtttgcaagcagcagattacgcgcagaaaaaaaggatctcaagaagatcctttgatcttttctacggggtctgacgctcagtggaacgaaaactcacgttaagggattttggtcatgagattatcaaaaaggatcttcacctagatccttttgatccggaatta

SEQ ID NO: 51 - DNA, 15033 bp, Artificial Sequence
  Vector 24376
attcctgtggttggcatgcacatacaaatggacgaacggataaaccttttcacgcccttttaaatatccgattattctaataaacgctcttttctcttaggtttacccgccaatatatcctgtcaaacactgatagtttaaactggcactagcctaacggtgttgactaactaggccgcttccctaattagctaacccgggggcgcgccgggaccctaattagctaaggtacctgcagtgcagcgtgacccggtcgtgcccctctctagagataatgagcattgcatgtctaagttataaaaaattaccacatattttttttgtcacacttgtttgaagtgcagtttatctatctttatacatatatttaaactttactctacgaataatataatctatagtactacaataatatcagtgttttagagaatcatataaatgaacagttagacatggtctaaaggacaattgagtattttgacaacaggactctacagttttatctttttagtgtgcatgtgttctcctttttttttgcaaatagcttcacctatataatacttcatccattttattagtacatccatttagggtttagggttaatggtttttatagactaatttttttagtacatctattttattctattttagcctctaaattaagaaaactaaaactctattttagtttttttatttaataatttagatataaaatagaataaaataaagtgactaaaaattaaacaaataccctttaagaaattaaaaaaactaaggaaacatttttcttgtttcgagtagataatgccagcctgttaaacgccgtcgacgagtctaacggacaccaaccagcgaaccagcagcgtcgcgtcgggccaagcgaagcagacggcacggcatctctgtcgctgcctctggacccctctcgagagttccgctccaccgttggacttgctccgctgtcggcatccagaaattgcgtggcggagcggcagacgtgagccggcacggcaggcggcctcctcctcctctcacggcaccggcagctacgggggattcctttcccaccgctccttcgctttcccttcctcgcccgccgtaataaatagacaccccctccacaccctctttccccaacctcgtgttgttcggagcgcacacacacacaaccagatctcccccaaatccacccgtcggcacctccgcttcctaggtacgccgctcgtcctccccccccccccctctctaccttctctagatcggcgttccggtccatagttagggcccggtagttctacttctgttcatgtttgtgttagatccgtgtttgtgttagatccgtgctgctagcgttcgtacacggatgcgacctgtacgtcagacacgttctgattgctaacttgccagtgtttctctttggggaatcctgggatggctctagccgttccgcagacgggatcgatttcatgattttttttgtttcgttgcatagggtttggtttgcccttttcctttatttcaatatatgccgtgcacttgtttgtcgggtcatcttttcatgcttttttttgtcttggttgtgatgatgtggtctggttgggcggtcgttctagatcggagtagaattctgtttcaaactacctggtggatttattaattttggatctgtatgtgtgtgccatacatattcatagttacgaattgaagatgatggatggaaatatcgatctaggataggtatacatgttgatgcgggttttactgatgcatatacagagatgctttttgttcgcttggttgtgatgatgtggtgtggttgggcggtcgttcattcgttctagatcggagtagaatactgtttcaaactacctggtgtatttattaattttggaactgtatgtgtgtgtcatacatcttcatagttacgagtttaagatggatggaaatatcgatctaggataggtatacatgttgatgtgggttttactgatgcatatacatgatggcatatgcagcatctattcatatgctctaaccttgagtacctatctattataataaacaagtatgttttataattattttgatcttgatatacttggatgatggcatatccagcagctatatgtggatttttttagccctgccttcatacgctatttatttgcttggtactgtttcttttgtcgatgctcaccctgttgtttggtgttacttctgcaggatcctctaagtagcagccatggacaacaaccccaacatcaacgagtgcatcccctacaactgcctgagcaaccccgaggtggaggtgctgggcggcgagcgcatcgagaccggctacacccccatcgacatcagcctgagcctgacccagttcctgctgagcgagttcgtgcccggcgccggcttcgtgctgggcctggtggacatcatctggggcatcttcggccccagccagtgggacgccttcctggtgcagatcgagcagttgataaaccaacgcatagaggaattcgcccgcaaccaggccatcagccgcctggagggcctgagcaacctgtaccaaatctacgccgagagcttccgcgagtgggaggccgaccccaccaaccccgccctgcgcgaggagatgcgcatccagttcaacgacatgaacagcgccctgaccaccgccatccccctgttcgccgtgcagaactaccaggtgcccctgctgagcgtgtacgtgcaggccgccaacctgcacctgagcgtgctgcgcgacgtcagcgtgttcggccagcgctggggcttcgacgccgccaccatcaacagccgctacaacgacctgacccgcctgatcggcaactacaccgaccacgccgtgcgctggtacaacaccggcctggagcgcgtgtgggggcccgacagccgcgactggatcaggtacaaccagttccgccgcgagctgaccctgaccgtgctggacatcgtgagcctgttccccaactacgacagccgcacctaccccatccgcaccgtgagccagctgacccgcgagatttacaccaaccccgtgctggagaacttcgacggcagcttccgcggcagcgcccagggcatcgagggcagcatccgcagcccccacctgatggacatcctgaacagcatcaccatctacaccgacgcccaccgcggcgagtactactggagcggccaccagatcatggccagccccgtcggcttcagcggccccgagttcaccttccccctgtacggcacgatgggcaacgctgcacctcagcagcgcatcgtggcacagctgggccagggagtgtaccgcaccctgagcagcaccctgtaccgtcgacctttcaacatcggcatcaacaaccagcagctgagcgtgctggacggcaccgagttcgcctacggcaccagcagcaacctgcccagcgccgtgtaccgcaagagcggcaccgtggacagcctggacgagatcccccctcagaacaacaacgtgccacctcgacagggcttcagccaccgtctgagccacgtgagcatgttccgcagtggcttcagcaacagcagcgtgagcatcatccgtgcacctatgttcagctggattcaccgcagtgccgagttcaacaacatcatccccagcagccagatcacccagatccccctgaccaagagcaccaacctgggcagcggcaccagcgtggtgaagggccccggcttcaccggcggcgacatcctgcgccgcaccagccccggccagatcagcaccctgcgcgtgaacatcaccgcccccctgagccagcgctaccgcgtccgcatccgctacgccagcaccaccaacctgcagttccacaccagcatcgacggccgccccatcaaccagggcaacttcagcgccaccatgagcagcggcagcaacctgcagagcggcagcttccgcaccgtgggcttcaccacccccttcaacttcagcaacggcagcagcgtgttcaccctgagcgcccacgtgttcaacagcggcaacgaggtgtacatcgaccgcatcgagttcgtgcccgccgaggtgaccttcgaggccgagtacgacctggagagggctcagaaggccgtgaacgagctgttcaccagcagcaaccagatcggcctgaagaccgacgtgaccgactaccacatcgaccaggtgagcaacctggtggagtgcttaagcgacgagttctgcctggacgagaagaaggagctgagcgagaaggtgaagcacgccaagcgcctgagcgacgagcgcaacctgctgcaggaccccaacttccgcggcatcaaccgccagctggaccgcggctggcgaggcagcaccgatatcaccatccagggcggcgacgacgtgttcaaggagaactacgtgaccctgctgggcaccttcgacgagtgctaccccacctacctgtaccagaagatcgacgagagcaagctgaaggcctacacccgctaccagctgcgcggctacatcgaggacagccaggacctggaaatctacctgatccgctacaacgcgaagcacgagaccgtgaacgtgcccggcaccggcagcctgtggcccctgagcgcccccagccccatcggcaagtgcactagcgacgaccccaaaggacaggtttcccacagctttattgaacaattgtttgcatctagtcaccacagccaccacttcagcctggacatcgacgtgggctgcaccgacctgaacgaggacctgggcgtgtgggtgatcttcaagatcaagacccaggacggccacgcccgcctgggcaatctagagttcctggaggagaagcccctggtgggcgaggccctggcccgcgtgaagcgtgctgagaagaagtggcgcgacaagcgcgagaagctggagtgggagaccaacatcgtgtacaaggaggccaaggagagcgtggacgccctgttcgtgaacagccagtacgaccgcctgcaggccgacaccaacatcgccatgatccacgccgccgacaagcgcgtgcacagcattcgcgaggcctacctgcccgagctgagcgtgatccccggtgtgaacgccgccatcttcgaggaactcgagggccgcatctaggagctctatgatcgttcaaacatttggcaataaagtttcttaagattgaatcctgttgccggtcttgcgatgattatcatataatttctgttgaattacgttaagcatgtaataattaacatgtaatgcatgacgttatttatgagatgggtttttatgattagagtcccgcaattatacatttaatacgcgatagaaaacaaaatatagcgcgcaaactaggataaattatcgcgcgcggtgtcatctatgttactagatcaatagactacggaccgcgatcgcttaattaagcttgcatgcctgcagtgcagcgtgacccggtcgtgcccctctctagagataatgagcattgcatgtctaagttataaaaaattaccacatattttttttgtcacacttgtttgaagtgcagtttatctatctttatacatatatttaaactttactctacgaataatataatctatagtactacaataatatcagtgttttagagaatcatataaatgaacagttagacatggtctaaaggacaattgagtattttgacaacaggactctacagttttatctttttagtgtgcatgtgttctcctttttttttgcaaatagcttcacctatataatacttcatccattttattagtacatccatttagggtttagggttaatggtttttatagactaatttttttagtacatctattttattctattttagcctctaaattaagaaaactaaaactctattttagtttttttatttaataatttagatataaaatagaataaaataaagtgactaaaaattaaacaaataccctttaagaaattaaaaaaactaaggaaacatttttcttgtttcgagtagataatgccagcctgttaaacgccgccgacgagtctaacggacaccaaccagcgaaccagcagcgtcgcgtcgggccaagcgaagcagacggcacggcatctctgtcgctgcctctggacccctctcgagagttccgctccaccgttggacttgctccgctgtcggcatccagaaattgcgtggcggagcggcagacgtgagccggcacggcaggcggcctcctcctcctctcacggcaccggcagctacgggggattcctttcccaccgctccttcgctttcccttcctcgcccgccgtaataaatagacaccccctccacaccctctttccccaacctcgtgttgttcggagcgcacacacacacaaccagatctcccccaaatccacccgtcggcacctccgcttcaaggtacgccgctcgtcctccccccccccccctctctaccttctctagatcggcgttccggtccatagttagggcccggtagttctacttctgttcatgtttgtgttagatccgtgtttgtgttagatccgtgctgttagcgttcgtacacggatgcgacctgtacgtcagacacgttctgattgctaacttgccagtgtttctctttggggaatcctgggatggctctagccgttccgcagacgggatcgatttcatgattttttttgtttcgttgcatagggtttggtttgcccttttcctttatttcaatatatgccgtgcacttgtttgtcgggtcatcttttcatgcttttttttgtcttggttgtgatgatgtggtctggttgggcggtcgttctagatcggagtagaattctgtttcaaactacctggtggatttattaattttggatctgtatgtgtgtgccatacatattcatagttacgaattgaagatgatggatggaaatatcgatctaggataggtatacatgttgatgcgggttttactgatgcatatacagagatgctttttgttcgcttggttgtgatgatgtggtgtggttgggcggtcgttcattcgttctagatcggagtagaatactgtttcaaactacctggtgtatttattaattttggaactgtatgtgtgtgtcatacatcttcatagttacgagtttaagatggatggaaatatcgatctaggataggtatacatgttgatgtgggttttactgatgcatatacatgatggcatatgcagcatctattcatatgctctaaccttgagtacctatctattataataaacaagtatgttttataattattttgatcttgatatacttggatgatggcatatgcagcagctatatgtggatttttttagccctgccttcatacgctatttatttgcttggtactgtttcttttgtcgatgctcaccctgttgtttggtgttacttctgcagggatctccgatcatgcaaaaactcattaactcagtgcaaaactatgcctggggcagcaaaacggcgttgactgaactttatggtatggaaaatccgtccagccagccgatggccgagctgtggatgggcgcacatccgaaaagcagttcacgagtgcagaatgccgccggagatatcgtttcactgcgtgatgtgattgagagtgataaatcgactctgctcggagaggccgttgccaaacgctttggcgaactgcctttcctgttcaaagtattatgcgcagcacagccactctccattcaggttcatccaaacaaacacaattctgaaatcggttttgccaaagaaaatgccgcaggtatcccgatggatgccgccgagcgtaactataaagatcctaaccacaagccggagctggtttttgcgctgacgcctttccttgcgatgaacgcgtttcgtgaattttccgagattgtctccctactccagccggtcgcaggtgcacatccggcgattgctcactttttacaacagcctgatgccgaacgtttaagcgaactgttcgccagcctgttgaatatgcagggtgaagaaaaatcccgcgcgctggcgattttaaaatcggccctcgatagccagcagggtgaaccgtggcaaacgattcgtttaatttctgaattttacccggaagacagcggtctgttctccccgctattgctgaatgtggtgaaattgaaccctggcgaagcgatgttcctgttcgctgaaacaccgcacgcttacctgcaaggcgtggcgctggaagtgatggcaaactccgataacgtgctgcgtgcgggtctgacgcctaaatacattgatattccggaactggttgccaatgtgaaattcgaagccaaaccggctaaccagttgttgacccagccggtgaaacaaggtgcagaactggacttcccgattccagtggatgattttgccttctcgctgcatgaccttagtgataaagaaaccaccattagccagcagagtgccgccattttgttctgcgtcgaaggcgatgcaacgttgtggaaaggttctcagcagttacagcttaaaccgggtgaatcagcgtttattgccgccaacgaatcaccggtgactgtcaaaggccacggccgtttagcgcgtgtttacaacaagctgtaagagcttactgaaaaaattaacatctcttgctaagctgggtcatgggtcgtttaagctgccgatgtgcctgcgtcgtctggtgccctctctccatatggaggttgtcaaagtatctgctgttcgtgtcatgagtcgtgtcagtgttggtttaataatggaccggttgtgttgtgtgtgcgtactacccagaactatgacaaatcatgaataagtttgatgtttgaaattaaagcctgtgctcattatgttctgtctttcagttgtctcctaatatttgcctccaggtactggctatctaccgtttcttacttaggaggtgtttgaatgcactaaaactaatagttagtggctaaaattagttaaaacatccaaacaccatagctaatagttgaactattagctatttttggaaaattagttaatagtgaggtagttatttgttagctagctaattcaactaacaatttttagccaactaacaattagtttcagtgcattcaaacacccccttaatgttaacgtggttctatctaccgtctcctaatatatggttgattgttcggtttgttgctatgctattgggttctgattgctgctagttcttgctgaatccagaagttctcgtagtatagctcagattcatattatttatttgagtgataagtgatccaggttattactatgttagctaggttttttttacaaggataaattatctgtgatcataattcttatgaaagctttatgtttcctggaggcagtggcatgcaatgcatgacagcaacttgatcacaccagctgaggtagatacggtaacaaggttcttaaatctgttcaccaaatcattggagaacacacatacacattcttgccagtcttggttagagaaatttcatgacaaaatgccaaagctgtcttgactcttcacttttggccatgagtcgtgacttagtttggtttaatggaccggttctcctagcttgttctactcaaaactgttgttgatgcgaataagttgtgatggttgatctctggattttgttttgctctcaatagtggacgagattagatagcctgcaggcccgggggcgcgccctaattagctaacggccaggatcgccgcgtgagcctttagcaactagctagattaattaacgcaatctgttattaagttgtctaagcgtcaatttgtttacaccacaatatatcctgccaccagccagccaacagctccccgaccggcagctcggcacaaaatcaccactcgatacaggcagcccatcagaattaattctcatgtttgacagcttatcatcgactgcacggtgcaccaatgcttctggcgtcaggcagccatcggaagctgtggtatggctgtgcaggtcgtaaatcactgcataattcgtgtcgctcaaggcgcactcccgttctggataatgttttttgcgccgacatcataacggttctggcaaatattctgaaatgagctgttgacaattaatcatccggctcgtataatgtgtggaattgtgagcggataacaatttcacacaggaaacagaccatgagggaagcgttgatcgccgaagtatcgactcaactatcagaggtagttggcgtcatcgagcgccatctcgaaccgacgttgctggccgtacatttgtacggctccgcagtggatggcggcctgaagccacacagtgatattgatttgctggttacggtgaccgtaaggcttgatgaaacaacgcggcgagctttgatcaacgaccttttggaaacttcggcttcccctggagagagcgagattctccgcgctgtagaagtcaccattgttgtgcacgacgacatcattccgtggcgttatccagctaagcgcgaactgcaatttggagaatggcagcgcaatgacattcttgcaggtatcttcgagccagccacgatcgacattgatctggctatcttgctgacaaaagcaagagaacatagcgttgccttggtaggtccagcggcggaggaactctttgatccggttcctgaacaggatctatttgaggcgctaaatgaaaccttaacgctatggaactcgccgcccgactgggctggcgatgagcgaaatgtagtgcttacgttgtcccgcatttggtacagcgcagtaaccggcaaaatcgcgccgaaggatgtcgctgccgactgggcaatggagcgcctgccggcccagtatcagcccgtcatacttgaagctaggcaggcttatcttggacaagaagatcgcttggcctcgcgcgcagatcagttggaagaatttgttcactacgtgaaaggcgagatcaccaaagtagtcggcaaataaagctctagtggatctccgtacccagggatctggctcgcggcggacgcacgacgccggggcgagaccataggcgatctcctaaatcaatagtagctgtaacctcgaagcgtttcacttgtaacaacgattgagaatttttgtcataaaattgaaatacttggttcgcatttttgtcatccgcggtcagccgcaattctgacgaactgcccatttagctggagatgattgtacatccttcacgtgaaaatttctcaagcgctgtgaacaagggttcagattttagattgaaaggtgagccgttgaaacacgttcttcttgtcgatgacgacgtcgctatgcggcatcttattattgaataccttacgatccacgccttcaaagtgaccgcggtagccgacagcacccagttcacaagagtactctcttccgcgacggtcgatgtcgtggttgttgatctagatttaggtcgtgaagatgggctcgagatcgttcgtaatctggcggcaaagtctgatattccaatcataattatcagtggcgaccgccttgaggagacggataaagttgttgcactcgagctaggagcaagtgattttatcgctaagccgttcagtatcagagagtttctagcacgcattcgggttgccttgcgcgtgcgccccaacgttgtccgctccaaagaccgacggtctttttgttttactgactggacacttaatctcaggcaacgtcgcttgatgtccgaagctggcggtgaggtgaaacttacggcaggtgagttcaatcttctcctcgcgtttttagagaaaccccgcgacgttctatcgcgcgagcaacttctcattgccagtcgagtacgcgacgaggaggtttatgacaggagtatagatgttctcattttgaggctgcgccgcaaacttgaggcagatccgtcaagccctcaactgataaaaacagcaagaggtgccggttatttctttgacgcggacgtgcaggtttcgcacggggggacgatggcagcctgagccaattcccagatccccgaggaatcggcgtgagcggtcgcaaaccatccggcccggtacaaatcggcgcggcgctgggtgatgacctggtggagaagttgaaggccgcgcaggccgcccagcggcaacgcatcgaggcagaagcacgccccggtgaatcgtggcaagcggccgctgatcgaatccgcaaagaatcccggcaaccgccggcagccggtgcgccgtcgattaggaagccgcccaagggcgacgagcaaccagattttttcgttccgatgctctatgacgtgggcacccgcgatagtcgcagcatcatggacgtggccgttttccgtctgtcgaagcgtgaccgacgagctggcgaggtgatccgctacgagcttccagacgggcacgtagaggtttccgcagggccggccggcatggccagtgtgtgggattacgacctggtactgatggcggtttcccatctaaccgaatccatgaaccgataccgggaagggaagggagacaagcccggccgcgtgttccgtccacacgttgcggacgtactcaagttctgccggcgagccgatggcggaaagcagaaagacgacctggtagaaacctgcattcggttaaacaccacgcacgttgccatgcagcgtacgaagaaggccaagaacggccgcctggtgacggtatccgagggtgaagccttgattagccgctacaagatcgtaaagagcgaaaccgggcggccggagtacatcgagatcgagctggctgattggatgtaccgcgagatcacagaaggcaagaacccggacgtgctgacggttcaccccgattactttttgatcgatcccggcatcggccgttttctctaccgcctggcacgccgcgccgcaggcaaggcagaagccagatggttgttcaagacgatctacgaacgcagtggcagcgccggagagttcaagaagttctgtttcaccgtgcgcaagctgatcgggtcaaatgacctgccggagtacgatttgaaggaggaggcggggcaggctggcccgatcctagtcatgcgctaccgcaacctgatcgagggcgaagcatccgccggttcctaatgtacggagcagatgctagggcaaattgccctagcaggggaaaaaggtcgaaaaggtctctttcctgtggatagcacgtacattgggaacccaaagccgtacattgggaaccggaacccgtacattgggaacccaaagccgtacattgggaaccggtcacacatgtaagtgactgatataaaagagaaaaaaggcgatttttccgcctaaaactctttaaaacttattaaaactcttaaaacccgcctggcctgtgcataactgtctggccagcgcacagccgaagagctgcaaaaagcgcctacccttcggtcgctgcgctccctacgccccgccgcttcgcgtcggcctatcgcggccgctggccgctcaaaaatggctggcctacggccaggcaatctaccagggcgcggacaagccgcgccgtcgccactcgaccgccggcgctgaggtctgcctcgtgaagaaggtgttgctgactcataccaggcctgaatcgccccatcatccagccagaaagtgagggagccacggttgatgagagctttgttgtaggtggaccagttggtgattttgaacttttgctttgccacggaacggtctgcgttgtcgggaagatgcgtgatctgatccttcaactcagcaaaagttcgatttattcaacaaagccgccgtcccgtcaagtcagcgtaatgctctgccagtgttacaaccaattaaccaattctgattagaaaaactcatcgagcatcaaatgaaactgcaatttattcatatcaggattatcaataccatatttttgaaaaagccgtttctgtaatgaaggagaaaactcaccgaggcagttccataggatggcaagatcctggtatcggtctgcgattccgactcgtccaacatcaatacaacctattaatttcccctcgtcaaaaataaggttatcaagtgagaaatcaccatgagtgacgactgaatccggtgagaatggcaaaagctctgcattaatgaatcggccaacgcgcggggagaggcggtttgcgtattgggcgctcttccgcttcctcgctcactgactcgctgcgctcggtcgttcggctgcggcgagcggtatcagctcactcaaaggcggtaatacggttatccacagaatcaggggataacgcaggaaagaacatgtgagcaaaaggccagcaaaaggccaggaaccgtaaaaaggccgcgttgctggcgtttttccataggctccgcccccctgacgagcatcacaaaaatcgacgctcaagtcagaggtggcgaaacccgacaggactataaagataccaggcgtttccccctggaagctccctcgtgcgctctcctgttccgaccctgccgcttaccggatacctgtccgcctttctcccttcgggaagcgtggcgctttctcatagctcacgctgtaggtatctcagttcggtgtaggtcgttcgctccaagctgggctgtgtgcacgaaccccccgttcagcccgaccgctgcgccttatccggtaactatcgtcttgagtccaacccggtaagacacgacttatcgccactggcagcagccactggtaacaggattagcagagcgaggtatgtaggcggtgctacagagttcttgaagtggtggcctaactacggctacactagaagaacagtatttggtatctgcgctctgctgaagccagttaccttcggaaaaagagttggtagctcttgatccggcaaacaaaccaccgctggtagcggtggtttttttgtttgcaagcagcagattacgcgcagaaaaaaaggatctcaagaagatcctttgatcttttctacggggtctgacgctcagtggaacgaaaactcacgttaagggattttggtcatgagattatcaaaaaggatcttcacctagatccttttgatccggaatta

SEQ ID NO: 52 - DNA, 15030 bp, Artificial Sequence
  Vector 24377
attcctgtggttggcatgcacatacaaatggacgaacggataaaccttttcacgcccttttaaatatccgattattctaataaacgctcttttctcttaggtttacccgccaatatatcctgtcaaacactgatagtttaaactggcactagcctaacggtgttgactaactaggccgcttccctaattagctaacccgggggcgcgccgggaccctaattagctaaggtacctgcagtgcagcgtgacccggtcgtgcccctctctagagataatgagcattgcatgtctaagttataaaaaattaccacatattttttttgtcacacttgtttgaagtgcagtttatctatctttatacatatatttaaactttactctacgaataatataatctatagtactacaataatatcagtgttttagagaatcatataaatgaacagttagacatggtctaaaggacaattgagtattttgacaacaggactctacagttttatctttttagtgtgcatgtgttctcctttttttttgcaaatagcttcacctatataatacttcatccattttattagtacatccatttagggtttagggttaatggtttttatagactaatttttttagtacatctattttattctattttagcctctaaattaagaaaactaaaactctattttagtttttttatttaataatttagatataaaatagaataaaataaagtgactaaaaattaaacaaataccctttaagaaattaaaaaaactaaggaaacatttttcttgtttcgagtagataatgccagcctgttaaacgccgtcgacgagtctaacggacaccaaccagcgaaccagcagcgtcgcgtcgggccaagcgaagcagacggcacggcatctctgtcgctgcctctggacccctctcgagagttccgctccaccgttggacttgctccgctgtcggcatccagaaattgcgtggcggagcggcagacgtgagccggcacggcaggcggcctcctcctcctctcacggcaccggcagctacgggggattcctttcccaccgctccttcgctttcccttcctcgcccgccgtaataaatagacaccccctccacaccctctttccccaacctcgtgttgttcggagcgcacacacacacaaccagatctcccccaaatccacccgtcggcacctccgcttcctaggtacgccgctcgtcctccccccccccccctctctaccttctctagatcggcgttccggtccatagttagggcccggtagttctacttctgttcatgtttgtgttagatccgtgtttgtgttagatccgtgctgctagcgttcgtacacggatgcgacctgtacgtcagacacgttctgattgctaacttgccagtgtttctctttggggaatcctgggatggctctagccgttccgcagacgggatcgatttcatgattttttttgtttcgttgcatagggtttggtttgcccttttcctttatttcaatatatgccgtgcacttgtttgtcgggtcatcttttcatgcttttttttgtcttggttgtgatgatgtggtctggttgggcggtcgttctagatcggagtagaattctgtttcaaactacctggtggatttattaattttggatctgtatgtgtgtgccatacatattcatagttacgaattgaagatgatggatggaaatatcgatctaggataggtatacatgttgatgcgggttttactgatgcatatacagagatgctttttgttcgcttggttgtgatgatgtggtgtggttgggcggtcgttcattcgttctagatcggagtagaatactgtttcaaactacctggtgtatttattaattttggaactgtatgtgtgtgtcatacatcttcatagttacgagtttaagatggatggaaatatcgatctaggataggtatacatgttgatgtgggttttactgatgcatatacatgatggcatatgcagcatctattcatatgctctaaccttgagtacctatctattataataaacaagtatgttttataattattttgatcttgatatacttggatgatggcatatccagcagctatatgtggatttttttagccctgccttcatacgctatttatttgcttggtactgtttcttttgtcgatgctcaccctgttgtttggtgttacttctgcaggatcctctaagtagcagccatggacaacaaccccaacatcaacgagtgcatcccctacaactgcctgagcaaccccgaggtggaggtgctgggcggcgagcgcatcgagaccggctacacccccatcgacatcagcctgagcctgacccagttcctgctgagcgagttcgtgcccggcgccggcttcgtgctgggcctggtggacatcatctggggcatcttcggccccagccagtgggacgccttcctggtgcagatcgagcagttgataaaccaacgcatagaggaattcgcccgcaaccaggccatcagccgcctggagggcctgagcaacctgtaccaaatctacgccgagagcttccgcgagtgggaggccgaccccaccaaccccgccctgcgcgaggagatgcgcatccagttcaacgacatgaacagcgccctgaccaccgccatccccctgttcgccgtgcagaactaccaggtgcccctgctgagcgtgtacgtgcaggccgccaacctgcacctgagcgtgctgcgcgacgtcagcgtgttcggccagcgctggggcttcgacgccgccaccatcaacagccgctacaacgacctgacccgcctgatcggcaactacaccgaccacgccgtgcgctggtacaacaccggcctggagcgcgtgtgggggcccgacagccgcgactggatcaggtacaaccagttccgccgcgagctgaccctgaccgtgctggacatcgtgagcctgttccccaactacgacagccgcacctaccccatccgcaccgtgagccagctgacccgcgagatttacaccaaccccgtgctggagaacttcgacggcagcttccgcggcagcgcccagggcatcgagggcagcatccgcagcccccacctgatggacatcctgaacagcatcaccatctacaccgacgcccaccgcggcgagtactactggagcggccaccagatcatggccagccccgtcggcttcagcggccccgagttcaccttccccctgtacggcacgatgggcaacgctgcacctcagcagcgcatcgtggcacagctgggccagggagtgtaccgcaccctgagcagcaccctgtaccgtcgacctttcaacatcggcatcaacaaccagcagctgagcgtgctggacggcaccgagttcgcctacggcaccagcagcaacctgcccagcgccgtgtaccgcaagagcggcaccgtggacagcctggacgagatcccccctcagaacaacaacgtgccacctcgacagggcttcagccaccgtctgagccacgtgagcatgttccgcagtggcttcagcaacagcagcgtgagcatcatccgtgcacctatgttcagctggattcaccgcagtgccgagttcaacaacatcatccccagcagccagatcacccagatccccctgaccaagagcaccaacctgggcagcggcaccagcgtggtgaagggccccggcttcaccggcggcgacatcctgcgccgcaccagccccggccagatcagcaccctgcgcgtgaacatcaccgcccccctgagccagcgctaccgcgtccgcatccgctacgccagcaccaccaacctgcagttccacaccagcatcgacggccgccccatcaaccagggcaacttcagcgccaccatgagcagcggcagcaacctgcagagcggcagcttccgcaccgtgggcttcaccacccccttcaacttcagcaacggcagcagcgtgttcaccctgagcgcccacgtgttcaacagcggcaacgaggtgtacatcgaccgcatcgagttcgtgcccgccgaggtgaccttcgaggccgagtacgacctggagagggctcagaaggccgtgaacgagctgttcaccagcagcaaccagatcggcctgaagaccgacgtgaccgactaccacatcgaccaggtgagcaacctggtggagtgcttaagcgacgagttctgcctggacgagaagaaggagctgagcgagaaggtgaagcacgccaagcgcctgagcgacgagcgcaacctgctgcaggaccccaacttccgcggcatcaaccgccagctggaccgcggctggcgaggcagcaccgatatcaccatccagggcggcgacgacgtgttcaaggagaactacgtgaccctgctgggcaccttcgacgagtgctaccccacctacctgtaccagaagatcgacgagagcaagctgaaggcctacacccgctaccagctgcgcggctacatcgaggacagccaggacctggaaatctacctgatccgctacaacgcgaagcacgagaccgtgaacgtgcccggcaccggcagcctgtggcccctgagcgcccccagccccatcggcaagtgcactagtcctttctctctctttctttctctctgctttattgaacttctcaaagttactagtcaccacagccaccacttcagcctggacatcgacgtgggctgcaccgacctgaacgaggacctgggcgtgtgggtgatcttcaagatcaagacccaggacggccacgcccgcctgggcaatctagagttcctggaggagaagcccctggtgggcgaggccctggcccgcgtgaagcgtgctgagaagaagtggcgcgacaagcgcgagaagctggagtgggagaccaacatcgtgtacaaggaggccaaggagagcgtggacgccctgttcgtgaacagccagtacgaccgcctgcaggccgacaccaacatcgccatgatccacgccgccgacaagcgcgtgcacagcattcgcgaggcctacctgcccgagctgagcgtgatccccggtgtgaacgccgccatcttcgaggaactcgagggccgcatctaggagctctatgatcgttcaaacatttggcaataaagtttcttaagattgaatcctgttgccggtcttgcgatgattatcatataatttctgttgaattacgttaagcatgtaataattaacatgtaatgcatgacgttatttatgagatgggtttttatgattagagtcccgcaattatacatttaatacgcgatagaaaacaaaatatagcgcgcaaactaggataaattatcgcgcgcggtgtcatctatgttactagatcaatagactacggaccgcgatcgcttaattaagcttgcatgcctgcagtgcagcgtgacccggtcgtgcccctctctagagataatgagcattgcatgtctaagttataaaaaattaccacatattttttttgtcacacttgtttgaagtgcagtttatctatctttatacatatatttaaactttactctacgaataatataatctatagtactacaataatatcagtgttttagagaatcatataaatgaacagttagacatggtctaaaggacaattgagtattttgacaacaggactctacagttttatctttttagtgtgcatgtgttctcctttttttttgcaaatagcttcacctatataatacttcatccattttattagtacatccatttagggtttagggttaatggtttttatagactaatttttttagtacatctattttattctattttagcctctaaattaagaaaactaaaactctattttagtttttttatttaataatttagatataaaatagaataaaataaagtgactaaaaattaaacaaataccctttaagaaattaaaaaaactaaggaaacatttttcttgtttcgagtagataatgccagcctgttaaacgccgccgacgagtctaacggacaccaaccagcgaaccagcagcgtcgcgtcgggccaagcgaagcagacggcacggcatctctgtcgctgcctctggacccctctcgagagttccgctccaccgttggacttgctccgctgtcggcatccagaaattgcgtggcggagcggcagacgtgagccggcacggcaggcggcctcctcctcctctcacggcaccggcagctacgggggattcctttcccaccgctccttcgctttcccttcctcgcccgccgtaataaatagacaccccctccacaccctctttccccaacctcgtgttgttcggagcgcacacacacacaaccagatctcccccaaatccacccgtcggcacctccgcttcaaggtacgccgctcgtcctccccccccccccctctctaccttctctagatcggcgttccggtccatagttagggcccggtagttctacttctgttcatgtttgtgttagatccgtgtttgtgttagatccgtgctgttagcgttcgtacacggatgcgacctgtacgtcagacacgttctgattgctaacttgccagtgtttctctttggggaatcctgggatggctctagccgttccgcagacgggatcgatttcatgattttttttgtttcgttgcatagggtttggtttgcccttttcctttatttcaatatatgccgtgcacttgtttgtcgggtcatcttttcatgcttttttttgtcttggttgtgatgatgtggtctggttgggcggtcgttctagatcggagtagaattctgtttcaaactacctggtggatttattaattttggatctgtatgtgtgtgccatacatattcatagttacgaattgaagatgatggatggaaatatcgatctaggataggtatacatgttgatgcgggttttactgatgcatatacagagatgctttttgttcgcttggttgtgatgatgtggtgtggttgggcggtcgttcattcgttctagatcggagtagaatactgtttcaaactacctggtgtatttattaattttggaactgtatgtgtgtgtcatacatcttcatagttacgagtttaagatggatggaaatatcgatctaggataggtatacatgttgatgtgggttttactgatgcatatacatgatggcatatgcagcatctattcatatgctctaaccttgagtacctatctattataataaacaagtatgttttataattattttgatcttgatatacttggatgatggcatatgcagcagctatatgtggatttttttagccctgccttcatacgctatttatttgcttggtactgtttcttttgtcgatgctcaccctgttgtttggtgttacttctgcagggatctccgatcatgcaaaaactcattaactcagtgcaaaactatgcctggggcagcaaaacggcgttgactgaactttatggtatggaaaatccgtccagccagccgatggccgagctgtggatgggcgcacatccgaaaagcagttcacgagtgcagaatgccgccggagatatcgtttcactgcgtgatgtgattgagagtgataaatcgactctgctcggagaggccgttgccaaacgctttggcgaactgcctttcctgttcaaagtattatgcgcagcacagccactctccattcaggttcatccaaacaaacacaattctgaaatcggttttgccaaagaaaatgccgcaggtatcccgatggatgccgccgagcgtaactataaagatcctaaccacaagccggagctggtttttgcgctgacgcctttccttgcgatgaacgcgtttcgtgaattttccgagattgtctccctactccagccggtcgcaggtgcacatccggcgattgctcactttttacaacagcctgatgccgaacgtttaagcgaactgttcgccagcctgttgaatatgcagggtgaagaaaaatcccgcgcgctggcgattttaaaatcggccctcgatagccagcagggtgaaccgtggcaaacgattcgtttaatttctgaattttacccggaagacagcggtctgttctccccgctattgctgaatgtggtgaaattgaaccctggcgaagcgatgttcctgttcgctgaaacaccgcacgcttacctgcaaggcgtggcgctggaagtgatggcaaactccgataacgtgctgcgtgcgggtctgacgcctaaatacattgatattccggaactggttgccaatgtgaaattcgaagccaaaccggctaaccagttgttgacccagccggtgaaacaaggtgcagaactggacttcccgattccagtggatgattttgccttctcgctgcatgaccttagtgataaagaaaccaccattagccagcagagtgccgccattttgttctgcgtcgaaggcgatgcaacgttgtggaaaggttctcagcagttacagcttaaaccgggtgaatcagcgtttattgccgccaacgaatcaccggtgactgtcaaaggccacggccgtttagcgcgtgtttacaacaagctgtaagagcttactgaaaaaattaacatctcttgctaagctgggtcatgggtcgtttaagctgccgatgtgcctgcgtcgtctggtgccctctctccatatggaggttgtcaaagtatctgctgttcgtgtcatgagtcgtgtcagtgttggtttaataatggaccggttgtgttgtgtgtgcgtactacccagaactatgacaaatcatgaataagtttgatgtttgaaattaaagcctgtgctcattatgttctgtctttcagttgtctcctaatatttgcctccaggtactggctatctaccgtttcttacttaggaggtgtttgaatgcactaaaactaatagttagtggctaaaattagttaaaacatccaaacaccatagctaatagttgaactattagctatttttggaaaattagttaatagtgaggtagttatttgttagctagctaattcaactaacaatttttagccaactaacaattagtttcagtgcattcaaacacccccttaatgttaacgtggttctatctaccgtctcctaatatatggttgattgttcggtttgttgctatgctattgggttctgattgctgctagttcttgctgaatccagaagttctcgtagtatagctcagattcatattatttatttgagtgataagtgatccaggttattactatgttagctaggttttttttacaaggataaattatctgtgatcataattcttatgaaagctttatgtttcctggaggcagtggcatgcaatgcatgacagcaacttgatcacaccagctgaggtagatacggtaacaaggttcttaaatctgttcaccaaatcattggagaacacacatacacattcttgccagtcttggttagagaaatttcatgacaaaatgccaaagctgtcttgactcttcacttttggccatgagtcgtgacttagtttggtttaatggaccggttctcctagcttgttctactcaaaactgttgttgatgcgaataagttgtgatggttgatctctggattttgttttgctctcaatagtggacgagattagatagcctgcaggcccgggggcgcgccctaattagctaacggccaggatcgccgcgtgagcctttagcaactagctagattaattaacgcaatctgttattaagttgtctaagcgtcaatttgtttacaccacaatatatcctgccaccagccagccaacagctccccgaccggcagctcggcacaaaatcaccactcgatacaggcagcccatcagaattaattctcatgtttgacagcttatcatcgactgcacggtgcaccaatgcttctggcgtcaggcagccatcggaagctgtggtatggctgtgcaggtcgtaaatcactgcataattcgtgtcgctcaaggcgcactcccgttctggataatgttttttgcgccgacatcataacggttctggcaaatattctgaaatgagctgttgacaattaatcatccggctcgtataatgtgtggaattgtgagcggataacaatttcacacaggaaacagaccatgagggaagcgttgatcgccgaagtatcgactcaactatcagaggtagttggcgtcatcgagcgccatctcgaaccgacgttgctggccgtacatttgtacggctccgcagtggatggcggcctgaagccacacagtgatattgatttgctggttacggtgaccgtaaggcttgatgaaacaacgcggcgagctttgatcaacgaccttttggaaacttcggcttcccctggagagagcgagattctccgcgctgtagaagtcaccattgttgtgcacgacgacatcattccgtggcgttatccagctaagcgcgaactgcaatttggagaatggcagcgcaatgacattcttgcaggtatcttcgagccagccacgatcgacattgatctggctatcttgctgacaaaagcaagagaacatagcgttgccttggtaggtccagcggcggaggaactctttgatccggttcctgaacaggatctatttgaggcgctaaatgaaaccttaacgctatggaactcgccgcccgactgggctggcgatgagcgaaatgtagtgcttacgttgtcccgcatttggtacagcgcagtaaccggcaaaatcgcgccgaaggatgtcgctgccgactgggcaatggagcgcctgccggcccagtatcagcccgtcatacttgaagctaggcaggcttatcttggacaagaagatcgcttggcctcgcgcgcagatcagttggaagaatttgttcactacgtgaaaggcgagatcaccaaagtagtcggcaaataaagctctagtggatctccgtacccagggatctggctcgcggcggacgcacgacgccggggcgagaccataggcgatctcctaaatcaatagtagctgtaacctcgaagcgtttcacttgtaacaacgattgagaatttttgtcataaaattgaaatacttggttcgcatttttgtcatccgcggtcagccgcaattctgacgaactgcccatttagctggagatgattgtacatccttcacgtgaaaatttctcaagcgctgtgaacaagggttcagattttagattgaaaggtgagccgttgaaacacgttcttcttgtcgatgacgacgtcgctatgcggcatcttattattgaataccttacgatccacgccttcaaagtgaccgcggtagccgacagcacccagttcacaagagtactctcttccgcgacggtcgatgtcgtggttgttgatctagatttaggtcgtgaagatgggctcgagatcgttcgtaatctggcggcaaagtctgatattccaatcataattatcagtggcgaccgccttgaggagacggataaagttgttgcactcgagctaggagcaagtgattttatcgctaagccgttcagtatcagagagtttctagcacgcattcgggttgccttgcgcgtgcgccccaacgttgtccgctccaaagaccgacggtctttttgttttactgactggacacttaatctcaggcaacgtcgcttgatgtccgaagctggcggtgaggtgaaacttacggcaggtgagttcaatcttctcctcgcgtttttagagaaaccccgcgacgttctatcgcgcgagcaacttctcattgccagtcgagtacgcgacgaggaggtttatgacaggagtatagatgttctcattttgaggctgcgccgcaaacttgaggcagatccgtcaagccctcaactgataaaaacagcaagaggtgccggttatttctttgacgcggacgtgcaggtttcgcacggggggacgatggcagcctgagccaattcccagatccccgaggaatcggcgtgagcggtcgcaaaccatccggcccggtacaaatcggcgcggcgctgggtgatgacctggtggagaagttgaaggccgcgcaggccgcccagcggcaacgcatcgaggcagaagcacgccccggtgaatcgtggcaagcggccgctgatcgaatccgcaaagaatcccggcaaccgccggcagccggtgcgccgtcgattaggaagccgcccaagggcgacgagcaaccagattttttcgttccgatgctctatgacgtgggcacccgcgatagtcgcagcatcatggacgtggccgttttccgtctgtcgaagcgtgaccgacgagctggcgaggtgatccgctacgagcttccagacgggcacgtagaggtttccgcagggccggccggcatggccagtgtgtgggattacgacctggtactgatggcggtttcccatctaaccgaatccatgaaccgataccgggaagggaagggagacaagcccggccgcgtgttccgtccacacgttgcggacgtactcaagttctgccggcgagccgatggcggaaagcagaaagacgacctggtagaaacctgcattcggttaaacaccacgcacgttgccatgcagcgtacgaagaaggccaagaacggccgcctggtgacggtatccgagggtgaagccttgattagccgctacaagatcgtaaagagcgaaaccgggcggccggagtacatcgagatcgagctggctgattggatgtaccgcgagatcacagaaggcaagaacccggacgtgctgacggttcaccccgattactttttgatcgatcccggcatcggccgttttctctaccgcctggcacgccgcgccgcaggcaaggcagaagccagatggttgttcaagacgatctacgaacgcagtggcagcgccggagagttcaagaagttctgtttcaccgtgcgcaagctgatcgggtcaaatgacctgccggagtacgatttgaaggaggaggcggggcaggctggcccgatcctagtcatgcgctaccgcaacctgatcgagggcgaagcatccgccggttcctaatgtacggagcagatgctagggcaaattgccctagcaggggaaaaaggtcgaaaaggtctctttcctgtggatagcacgtacattgggaacccaaagccgtacattgggaaccggaacccgtacattgggaacccaaagccgtacattgggaaccggtcacacatgtaagtgactgatataaaagagaaaaaaggcgatttttccgcctaaaactctttaaaacttattaaaactcttaaaacccgcctggcctgtgcataactgtctggccagcgcacagccgaagagctgcaaaaagcgcctacccttcggtcgctgcgctccctacgccccgccgcttcgcgtcggcctatcgcggccgctggccgctcaaaaatggctggcctacggccaggcaatctaccagggcgcggacaagccgcgccgtcgccactcgaccgccggcgctgaggtctgcctcgtgaagaaggtgttgctgactcataccaggcctgaatcgccccatcatccagccagaaagtgagggagccacggttgatgagagctttgttgtaggtggaccagttggtgattttgaacttttgctttgccacggaacggtctgcgttgtcgggaagatgcgtgatctgatccttcaactcagcaaaagttcgatttattcaacaaagccgccgtcccgtcaagtcagcgtaatgctctgccagtgttacaaccaattaaccaattctgattagaaaaactcatcgagcatcaaatgaaactgcaatttattcatatcaggattatcaataccatatttttgaaaaagccgtttctgtaatgaaggagaaaactcaccgaggcagttccataggatggcaagatcctggtatcggtctgcgattccgactcgtccaacatcaatacaacctattaatttcccctcgtcaaaaataaggttatcaagtgagaaatcaccatgagtgacgactgaatccggtgagaatggcaaaagctctgcattaatgaatcggccaacgcgcggggagaggcggtttgcgtattgggcgctcttccgcttcctcgctcactgactcgctgcgctcggtcgttcggctgcggcgagcggtatcagctcactcaaaggcggtaatacggttatccacagaatcaggggataacgcaggaaagaacatgtgagcaaaaggccagcaaaaggccaggaaccgtaaaaaggccgcgttgctggcgtttttccataggctccgcccccctgacgagcatcacaaaaatcgacgctcaagtcagaggtggcgaaacccgacaggactataaagataccaggcgtttccccctggaagctccctcgtgcgctctcctgttccgaccctgccgcttaccggatacctgtccgcctttctcccttcgggaagcgtggcgctttctcatagctcacgctgtaggtatctcagttcggtgtaggtcgttcgctccaagctgggctgtgtgcacgaaccccccgttcagcccgaccgctgcgccttatccggtaactatcgtcttgagtccaacccggtaagacacgacttatcgccactggcagcagccactggtaacaggattagcagagcgaggtatgtaggcggtgctacagagttcttgaagtggtggcctaactacggctacactagaagaacagtatttggtatctgcgctctgctgaagccagttaccttcggaaaaagagttggtagctcttgatccggcaaacaaaccaccgctggtagcggtggtttttttgtttgcaagcagcagattacgcgcagaaaaaaaggatctcaagaagatcctttgatcttttctacggggtctgacgctcagtggaacgaaaactcacgttaagggattttggtcatgagattatcaaaaaggatcttcacctagatccttttgatccggaatta

SEQ ID NO: 53 - DNA, 15033 bp, Artificial Sequence
  Vector 24379
attcctgtggttggcatgcacatacaaatggacgaacggataaaccttttcacgcccttttaaatatccgattattctaataaacgctcttttctcttaggtttacccgccaatatatcctgtcaaacactgatagtttaaactggcactagcctaacggtgttgactaactaggccgcttccctaattagctaacccgggggcgcgccgggaccctaattagctaaggtacctgcagtgcagcgtgacccggtcgtgcccctctctagagataatgagcattgcatgtctaagttataaaaaattaccacatattttttttgtcacacttgtttgaagtgcagtttatctatctttatacatatatttaaactttactctacgaataatataatctatagtactacaataatatcagtgttttagagaatcatataaatgaacagttagacatggtctaaaggacaattgagtattttgacaacaggactctacagttttatctttttagtgtgcatgtgttctcctttttttttgcaaatagcttcacctatataatacttcatccattttattagtacatccatttagggtttagggttaatggtttttatagactaatttttttagtacatctattttattctattttagcctctaaattaagaaaactaaaactctattttagtttttttatttaataatttagatataaaatagaataaaataaagtgactaaaaattaaacaaataccctttaagaaattaaaaaaactaaggaaacatttttcttgtttcgagtagataatgccagcctgttaaacgccgtcgacgagtctaacggacaccaaccagcgaaccagcagcgtcgcgtcgggccaagcgaagcagacggcacggcatctctgtcgctgcctctggacccctctcgagagttccgctccaccgttggacttgctccgctgtcggcatccagaaattgcgtggcggagcggcagacgtgagccggcacggcaggcggcctcctcctcctctcacggcaccggcagctacgggggattcctttcccaccgctccttcgctttcccttcctcgcccgccgtaataaatagacaccccctccacaccctctttccccaacctcgtgttgttcggagcgcacacacacacaaccagatctcccccaaatccacccgtcggcacctccgcttcctagcatccttttcattgataagaagagcaccgttcactccaactgcaaacttgtggctaggtacgccgctcgtcctccccccccccccctctctaccttctctagatcggcgttccggtccatagttagggcccggtagttctacttctgttcatgtttgtgttagatccgtgtttgtgttagatccgtgctgctagcgttcgtacacggatgcgacctgtacgtcagacacgttctgattgctaacttgccagtgtttctctttggggaatcctgggatggctctagccgttccgcagacgggatcgatttcatgattttttttgtttcgttgcatagggtttggtttgcccttttcctttatttcaatatatgccgtgcacttgtttgtcgggtcatcttttcatgcttttttttgtcttggttgtgatgatgtggtctggttgggcggtcgttctagatcggagtagaattctgtttcaaactacctggtggatttattaattttggatctgtatgtgtgtgccatacatattcatagttacgaattgaagatgatggatggaaatatcgatctaggataggtatacatgttgatgcgggttttactgatgcatatacagagatgctttttgttcgcttggttgtgatgatgtggtgtggttgggcggtcgttcattcgttctagatcggagtagaatactgtttcaaactacctggtgtatttattaattttggaactgtatgtgtgtgtcatacatcttcatagttacgagtttaagatggatggaaatatcgatctaggataggtatacatgttgatgtgggttttactgatgcatatacatgatggcatatgcagcatctattcatatgctctaaccttgagtacctatctattataataaacaagtatgttttataattattttgatcttgatatacttggatgatggcatatccagcagctatatgtggatttttttagccctgccttcatacgctatttatttgcttggtactgtttcttttgtcgatgctcaccctgttgtttggtgttacttctgcaggatcctctaagtagcagccatggacaacaaccccaacatcaacgagtgcatcccctacaactgcctgagcaaccccgaggtggaggtgctgggcggcgagcgcatcgagaccggctacacccccatcgacatcagcctgagcctgacccagttcctgctgagcgagttcgtgcccggcgccggcttcgtgctgggcctggtggacatcatctggggcatcttcggccccagccagtgggacgccttcctggtgcagatcgagcagttgataaaccaacgcatagaggaattcgcccgcaaccaggccatcagccgcctggagggcctgagcaacctgtaccaaatctacgccgagagcttccgcgagtgggaggccgaccccaccaaccccgccctgcgcgaggagatgcgcatccagttcaacgacatgaacagcgccctgaccaccgccatccccctgttcgccgtgcagaactaccaggtgcccctgctgagcgtgtacgtgcaggccgccaacctgcacctgagcgtgctgcgcgacgtcagcgtgttcggccagcgctggggcttcgacgccgccaccatcaacagccgctacaacgacctgacccgcctgatcggcaactacaccgaccacgccgtgcgctggtacaacaccggcctggagcgcgtgtgggggcccgacagccgcgactggatcaggtacaaccagttccgccgcgagctgaccctgaccgtgctggacatcgtgagcctgttccccaactacgacagccgcacctaccccatccgcaccgtgagccagctgacccgcgagatttacaccaaccccgtgctggagaacttcgacggcagcttccgcggcagcgcccagggcatcgagggcagcatccgcagcccccacctgatggacatcctgaacagcatcaccatctacaccgacgcccaccgcggcgagtactactggagcggccaccagatcatggccagccccgtcggcttcagcggccccgagttcaccttccccctgtacggcacgatgggcaacgctgcacctcagcagcgcatcgtggcacagctgggccagggagtgtaccgcaccctgagcagcaccctgtaccgtcgacctttcaacatcggcatcaacaaccagcagctgagcgtgctggacggcaccgagttcgcctacggcaccagcagcaacctgcccagcgccgtgtaccgcaagagcggcaccgtggacagcctggacgagatcccccctcagaacaacaacgtgccacctcgacagggcttcagccaccgtctgagccacgtgagcatgttccgcagtggcttcagcaacagcagcgtgagcatcatccgtgcacctatgttcagctggattcaccgcagtgccgagttcaacaacatcatccccagcagccagatcacccagatccccctgaccaagagcaccaacctgggcagcggcaccagcgtggtgaagggccccggcttcaccggcggcgacatcctgcgccgcaccagccccggccagatcagcaccctgcgcgtgaacatcaccgcccccctgagccagcgctaccgcgtccgcatccgctacgccagcaccaccaacctgcagttccacaccagcatcgacggccgccccatcaaccagggcaacttcagcgccaccatgagcagcggcagcaacctgcagagcggcagcttccgcaccgtgggcttcaccacccccttcaacttcagcaacggcagcagcgtgttcaccctgagcgcccacgtgttcaacagcggcaacgaggtgtacatcgaccgcatcgagttcgtgcccgccgaggtgaccttcgaggccgagtacgacctggagagggctcagaaggccgtgaacgagctgttcaccagcagcaaccagatcggcctgaagaccgacgtgaccgactaccacatcgaccaggtgagcaacctggtggagtgcttaagcgacgagttctgcctggacgagaagaaggagctgagcgagaaggtgaagcacgccaagcgcctgagcgacgagcgcaacctgctgcaggaccccaacttccgcggcatcaaccgccagctggaccgcggctggcgaggcagcaccgatatcaccatccagggcggcgacgacgtgttcaaggagaactacgtgaccctgctgggcaccttcgacgagtgctaccccacctacctgtaccagaagatcgacgagagcaagctgaaggcctacacccgctaccagctgcgcggctacatcgaggacagccaggacctggaaatctacctgatccgctacaacgcgaagcacgagaccgtgaacgtgcccggcaccggcagcctgtggcccctgagcgcccccagccccatcggcaagtgcactagtcaccacagccaccacttcagcctggacatcgacgtgggctgcaccgacctgaacgaggacctgggcgtgtgggtgatcttcaagatcaagacccaggacggccacgcccgcctgggcaatctagagttcctggaggagaagcccctggtgggcgaggccctggcccgcgtgaagcgtgctgagaagaagtggcgcgacaagcgcgagaagctggagtgggagaccaacatcgtgtacaaggaggccaaggagagcgtggacgccctgttcgtgaacagccagtacgaccgcctgcaggccgacaccaacatcgccatgatccacgccgccgacaagcgcgtgcacagcattcgcgaggcctacctgcccgagctgagcgtgatccccggtgtgaacgccgccatcttcgaggaactcgagggccgcatctaggagctctatgatcgttcaaacatttggcaataaagtttcttaagattgaatcctgttgccggtcttgcgatgattatcatataatttctgttgaattacgttaagcatgtaataattaacatgtaatgcatgacgttatttatgagatgggtttttatgattagagtcccgcaattatacatttaatacgcgatagaaaacaaaatatagcgcgcaaactaggataaattatcgcgcgcggtgtcatctatgttactagatcaatagactacggaccgcgatcgcttaattaagcttgcatgcctgcagtgcagcgtgacccggtcgtgcccctctctagagataatgagcattgcatgtctaagttataaaaaattaccacatattttttttgtcacacttgtttgaagtgcagtttatctatctttatacatatatttaaactttactctacgaataatataatctatagtactacaataatatcagtgttttagagaatcatataaatgaacagttagacatggtctaaaggacaattgagtattttgacaacaggactctacagttttatctttttagtgtgcatgtgttctcctttttttttgcaaatagcttcacctatataatacttcatccattttattagtacatccatttagggtttagggttaatggtttttatagactaatttttttagtacatctattttattctattttagcctctaaattaagaaaactaaaactctattttagtttttttatttaataatttagatataaaatagaataaaataaagtgactaaaaattaaacaaataccctttaagaaattaaaaaaactaaggaaacatttttcttgtttcgagtagataatgccagcctgttaaacgccgccgacgagtctaacggacaccaaccagcgaaccagcagcgtcgcgtcgggccaagcgaagcagacggcacggcatctctgtcgctgcctctggacccctctcgagagttccgctccaccgttggacttgctccgctgtcggcatccagaaattgcgtggcggagcggcagacgtgagccggcacggcaggcggcctcctcctcctctcacggcaccggcagctacgggggattcctttcccaccgctccttcgctttcccttcctcgcccgccgtaataaatagacaccccctccacaccctctttccccaacctcgtgttgttcggagcgcacacacacacaaccagatctcccccaaatccacccgtcggcacctccgcttcaaggtacgccgctcgtcctccccccccccccctctctaccttctctagatcggcgttccggtccatagttagggcccggtagttctacttctgttcatgtttgtgttagatccgtgtttgtgttagatccgtgctgttagcgttcgtacacggatgcgacctgtacgtcagacacgttctgattgctaacttgccagtgtttctctttggggaatcctgggatggctctagccgttccgcagacgggatcgatttcatgattttttttgtttcgttgcatagggtttggtttgcccttttcctttatttcaatatatgccgtgcacttgtttgtcgggtcatcttttcatgcttttttttgtcttggttgtgatgatgtggtctggttgggcggtcgttctagatcggagtagaattctgtttcaaactacctggtggatttattaattttggatctgtatgtgtgtgccatacatattcatagttacgaattgaagatgatggatggaaatatcgatctaggataggtatacatgttgatgcgggttttactgatgcatatacagagatgctttttgttcgcttggttgtgatgatgtggtgtggttgggcggtcgttcattcgttctagatcggagtagaatactgtttcaaactacctggtgtatttattaattttggaactgtatgtgtgtgtcatacatcttcatagttacgagtttaagatggatggaaatatcgatctaggataggtatacatgttgatgtgggttttactgatgcatatacatgatggcatatgcagcatctattcatatgctctaaccttgagtacctatctattataataaacaagtatgttttataattattttgatcttgatatacttggatgatggcatatgcagcagctatatgtggatttttttagccctgccttcatacgctatttatttgcttggtactgtttcttttgtcgatgctcaccctgttgtttggtgttacttctgcagggatctccgatcatgcaaaaactcattaactcagtgcaaaactatgcctggggcagcaaaacggcgttgactgaactttatggtatggaaaatccgtccagccagccgatggccgagctgtggatgggcgcacatccgaaaagcagttcacgagtgcagaatgccgccggagatatcgtttcactgcgtgatgtgattgagagtgataaatcgactctgctcggagaggccgttgccaaacgctttggcgaactgcctttcctgttcaaagtattatgcgcagcacagccactctccattcaggttcatccaaacaaacacaattctgaaatcggttttgccaaagaaaatgccgcaggtatcccgatggatgccgccgagcgtaactataaagatcctaaccacaagccggagctggtttttgcgctgacgcctttccttgcgatgaacgcgtttcgtgaattttccgagattgtctccctactccagccggtcgcaggtgcacatccggcgattgctcactttttacaacagcctgatgccgaacgtttaagcgaactgttcgccagcctgttgaatatgcagggtgaagaaaaatcccgcgcgctggcgattttaaaatcggccctcgatagccagcagggtgaaccgtggcaaacgattcgtttaatttctgaattttacccggaagacagcggtctgttctccccgctattgctgaatgtggtgaaattgaaccctggcgaagcgatgttcctgttcgctgaaacaccgcacgcttacctgcaaggcgtggcgctggaagtgatggcaaactccgataacgtgctgcgtgcgggtctgacgcctaaatacattgatattccggaactggttgccaatgtgaaattcgaagccaaaccggctaaccagttgttgacccagccggtgaaacaaggtgcagaactggacttcccgattccagtggatgattttgccttctcgctgcatgaccttagtgataaagaaaccaccattagccagcagagtgccgccattttgttctgcgtcgaaggcgatgcaacgttgtggaaaggttctcagcagttacagcttaaaccgggtgaatcagcgtttattgccgccaacgaatcaccggtgactgtcaaaggccacggccgtttagcgcgtgtttacaacaagctgtaagagcttactgaaaaaattaacatctcttgctaagctgggtcatgggtcgtttaagctgccgatgtgcctgcgtcgtctggtgccctctctccatatggaggttgtcaaagtatctgctgttcgtgtcatgagtcgtgtcagtgttggtttaataatggaccggttgtgttgtgtgtgcgtactacccagaactatgacaaatcatgaataagtttgatgtttgaaattaaagcctgtgctcattatgttctgtctttcagttgtctcctaatatttgcctccaggtactggctatctaccgtttcttacttaggaggtgtttgaatgcactaaaactaatagttagtggctaaaattagttaaaacatccaaacaccatagctaatagttgaactattagctatttttggaaaattagttaatagtgaggtagttatttgttagctagctaattcaactaacaatttttagccaactaacaattagtttcagtgcattcaaacacccccttaatgttaacgtggttctatctaccgtctcctaatatatggttgattgttcggtttgttgctatgctattgggttctgattgctgctagttcttgctgaatccagaagttctcgtagtatagctcagattcatattatttatttgagtgataagtgatccaggttattactatgttagctaggttttttttacaaggataaattatctgtgatcataattcttatgaaagctttatgtttcctggaggcagtggcatgcaatgcatgacagcaacttgatcacaccagctgaggtagatacggtaacaaggttcttaaatctgttcaccaaatcattggagaacacacatacacattcttgccagtcttggttagagaaatttcatgacaaaatgccaaagctgtcttgactcttcacttttggccatgagtcgtgacttagtttggtttaatggaccggttctcctagcttgttctactcaaaactgttgttgatgcgaataagttgtgatggttgatctctggattttgttttgctctcaatagtggacgagattagatagcctgcaggcccgggggcgcgccctaattagctaacggccaggatcgccgcgtgagcctttagcaactagctagattaattaacgcaatctgttattaagttgtctaagcgtcaatttgtttacaccacaatatatcctgccaccagccagccaacagctccccgaccggcagctcggcacaaaatcaccactcgatacaggcagcccatcagaattaattctcatgtttgacagcttatcatcgactgcacggtgcaccaatgcttctggcgtcaggcagccatcggaagctgtggtatggctgtgcaggtcgtaaatcactgcataattcgtgtcgctcaaggcgcactcccgttctggataatgttttttgcgccgacatcataacggttctggcaaatattctgaaatgagctgttgacaattaatcatccggctcgtataatgtgtggaattgtgagcggataacaatttcacacaggaaacagaccatgagggaagcgttgatcgccgaagtatcgactcaactatcagaggtagttggcgtcatcgagcgccatctcgaaccgacgttgctggccgtacatttgtacggctccgcagtggatggcggcctgaagccacacagtgatattgatttgctggttacggtgaccgtaaggcttgatgaaacaacgcggcgagctttgatcaacgaccttttggaaacttcggcttcccctggagagagcgagattctccgcgctgtagaagtcaccattgttgtgcacgacgacatcattccgtggcgttatccagctaagcgcgaactgcaatttggagaatggcagcgcaatgacattcttgcaggtatcttcgagccagccacgatcgacattgatctggctatcttgctgacaaaagcaagagaacatagcgttgccttggtaggtccagcggcggaggaactctttgatccggttcctgaacaggatctatttgaggcgctaaatgaaaccttaacgctatggaactcgccgcccgactgggctggcgatgagcgaaatgtagtgcttacgttgtcccgcatttggtacagcgcagtaaccggcaaaatcgcgccgaaggatgtcgctgccgactgggcaatggagcgcctgccggcccagtatcagcccgtcatacttgaagctaggcaggcttatcttggacaagaagatcgcttggcctcgcgcgcagatcagttggaagaatttgttcactacgtgaaaggcgagatcaccaaagtagtcggcaaataaagctctagtggatctccgtacccagggatctggctcgcggcggacgcacgacgccggggcgagaccataggcgatctcctaaatcaatagtagctgtaacctcgaagcgtttcacttgtaacaacgattgagaatttttgtcataaaattgaaatacttggttcgcatttttgtcatccgcggtcagccgcaattctgacgaactgcccatttagctggagatgattgtacatccttcacgtgaaaatttctcaagcgctgtgaacaagggttcagattttagattgaaaggtgagccgttgaaacacgttcttcttgtcgatgacgacgtcgctatgcggcatcttattattgaataccttacgatccacgccttcaaagtgaccgcggtagccgacagcacccagttcacaagagtactctcttccgcgacggtcgatgtcgtggttgttgatctagatttaggtcgtgaagatgggctcgagatcgttcgtaatctggcggcaaagtctgatattccaatcataattatcagtggcgaccgccttgaggagacggataaagttgttgcactcgagctaggagcaagtgattttatcgctaagccgttcagtatcagagagtttctagcacgcattcgggttgccttgcgcgtgcgccccaacgttgtccgctccaaagaccgacggtctttttgttttactgactggacacttaatctcaggcaacgtcgcttgatgtccgaagctggcggtgaggtgaaacttacggcaggtgagttcaatcttctcctcgcgtttttagagaaaccccgcgacgttctatcgcgcgagcaacttctcattgccagtcgagtacgcgacgaggaggtttatgacaggagtatagatgttctcattttgaggctgcgccgcaaacttgaggcagatccgtcaagccctcaactgataaaaacagcaagaggtgccggttatttctttgacgcggacgtgcaggtttcgcacggggggacgatggcagcctgagccaattcccagatccccgaggaatcggcgtgagcggtcgcaaaccatccggcccggtacaaatcggcgcggcgctgggtgatgacctggtggagaagttgaaggccgcgcaggccgcccagcggcaacgcatcgaggcagaagcacgccccggtgaatcgtggcaagcggccgctgatcgaatccgcaaagaatcccggcaaccgccggcagccggtgcgccgtcgattaggaagccgcccaagggcgacgagcaaccagattttttcgttccgatgctctatgacgtgggcacccgcgatagtcgcagcatcatggacgtggccgttttccgtctgtcgaagcgtgaccgacgagctggcgaggtgatccgctacgagcttccagacgggcacgtagaggtttccgcagggccggccggcatggccagtgtgtgggattacgacctggtactgatggcggtttcccatctaaccgaatccatgaaccgataccgggaagggaagggagacaagcccggccgcgtgttccgtccacacgttgcggacgtactcaagttctgccggcgagccgatggcggaaagcagaaagacgacctggtagaaacctgcattcggttaaacaccacgcacgttgccatgcagcgtacgaagaaggccaagaacggccgcctggtgacggtatccgagggtgaagccttgattagccgctacaagatcgtaaagagcgaaaccgggcggccggagtacatcgagatcgagctggctgattggatgtaccgcgagatcacagaaggcaagaacccggacgtgctgacggttcaccccgattactttttgatcgatcccggcatcggccgttttctctaccgcctggcacgccgcgccgcaggcaaggcagaagccagatggttgttcaagacgatctacgaacgcagtggcagcgccggagagttcaagaagttctgtttcaccgtgcgcaagctgatcgggtcaaatgacctgccggagtacgatttgaaggaggaggcggggcaggctggcccgatcctagtcatgcgctaccgcaacctgatcgagggcgaagcatccgccggttcctaatgtacggagcagatgctagggcaaattgccctagcaggggaaaaaggtcgaaaaggtctctttcctgtggatagcacgtacattgggaacccaaagccgtacattgggaaccggaacccgtacattgggaacccaaagccgtacattgggaaccggtcacacatgtaagtgactgatataaaagagaaaaaaggcgatttttccgcctaaaactctttaaaacttattaaaactcttaaaacccgcctggcctgtgcataactgtctggccagcgcacagccgaagagctgcaaaaagcgcctacccttcggtcgctgcgctccctacgccccgccgcttcgcgtcggcctatcgcggccgctggccgctcaaaaatggctggcctacggccaggcaatctaccagggcgcggacaagccgcgccgtcgccactcgaccgccggcgctgaggtctgcctcgtgaagaaggtgttgctgactcataccaggcctgaatcgccccatcatccagccagaaagtgagggagccacggttgatgagagctttgttgtaggtggaccagttggtgattttgaacttttgctttgccacggaacggtctgcgttgtcgggaagatgcgtgatctgatccttcaactcagcaaaagttcgatttattcaacaaagccgccgtcccgtcaagtcagcgtaatgctctgccagtgttacaaccaattaaccaattctgattagaaaaactcatcgagcatcaaatgaaactgcaatttattcatatcaggattatcaataccatatttttgaaaaagccgtttctgtaatgaaggagaaaactcaccgaggcagttccataggatggcaagatcctggtatcggtctgcgattccgactcgtccaacatcaatacaacctattaatttcccctcgtcaaaaataaggttatcaagtgagaaatcaccatgagtgacgactgaatccggtgagaatggcaaaagctctgcattaatgaatcggccaacgcgcggggagaggcggtttgcgtattgggcgctcttccgcttcctcgctcactgactcgctgcgctcggtcgttcggctgcggcgagcggtatcagctcactcaaaggcggtaatacggttatccacagaatcaggggataacgcaggaaagaacatgtgagcaaaaggccagcaaaaggccaggaaccgtaaaaaggccgcgttgctggcgtttttccataggctccgcccccctgacgagcatcacaaaaatcgacgctcaagtcagaggtggcgaaacccgacaggactataaagataccaggcgtttccccctggaagctccctcgtgcgctctcctgttccgaccctgccgcttaccggatacctgtccgcctttctcccttcgggaagcgtggcgctttctcatagctcacgctgtaggtatctcagttcggtgtaggtcgttcgctccaagctgggctgtgtgcacgaaccccccgttcagcccgaccgctgcgccttatccggtaactatcgtcttgagtccaacccggtaagacacgacttatcgccactggcagcagccactggtaacaggattagcagagcgaggtatgtaggcggtgctacagagttcttgaagtggtggcctaactacggctacactagaagaacagtatttggtatctgcgctctgctgaagccagttaccttcggaaaaagagttggtagctcttgatccggcaaacaaaccaccgctggtagcggtggtttttttgtttgcaagcagcagattacgcgcagaaaaaaaggatctcaagaagatcctttgatcttttctacggggtctgacgctcagtggaacgaaaactcacgttaagggattttggtcatgagattatcaaaaaggatcttcacctagatccttttgatccggaatta

SEQ ID NO: 54 - DNA, 15032 bp, Artificial Sequence
  Vector 24380
attcctgtggttggcatgcacatacaaatggacgaacggataaaccttttcacgcccttttaaatatccgattattctaataaacgctcttttctcttaggtttacccgccaatatatcctgtcaaacactgatagtttaaactggcactagcctaacggtgttgactaactaggccgcttccctaattagctaacccgggggcgcgccgggaccctaattagctaaggtacctgcagtgcagcgtgacccggtcgtgcccctctctagagataatgagcattgcatgtctaagttataaaaaattaccacatattttttttgtcacacttgtttgaagtgcagtttatctatctttatacatatatttaaactttactctacgaataatataatctatagtactacaataatatcagtgttttagagaatcatataaatgaacagttagacatggtctaaaggacaattgagtattttgacaacaggactctacagttttatctttttagtgtgcatgtgttctcctttttttttgcaaatagcttcacctatataatacttcatccattttattagtacatccatttagggtttagggttaatggtttttatagactaatttttttagtacatctattttattctattttagcctctaaattaagaaaactaaaactctattttagtttttttatttaataatttagatataaaatagaataaaataaagtgactaaaaattaaacaaataccctttaagaaattaaaaaaactaaggaaacatttttcttgtttcgagtagataatgccagcctgttaaacgccgtcgacgagtctaacggacaccaaccagcgaaccagcagcgtcgcgtcgggccaagcgaagcagacggcacggcatctctgtcgctgcctctggacccctctcgagagttccgctccaccgttggacttgctccgctgtcggcatccagaaattgcgtggcggagcggcagacgtgagccggcacggcaggcggcctcctcctcctctcacggcaccggcagctacgggggattcctttcccaccgctccttcgctttcccttcctcgcccgccgtaataaatagacaccccctccacaccctctttccccaacctcgtgttgttcggagcgcacacacacacaaccagatctcccccaaatccacccgtcggcacctccgcttcctagacatccaacacgcacgagatgacagatagagcagtgagctgaccatctcttactaggtacgccgctcgtcctccccccccccccctctctaccttctctagatcggcgttccggtccatagttagggcccggtagttctacttctgttcatgtttgtgttagatccgtgtttgtgttagatccgtgctgctagcgttcgtacacggatgcgacctgtacgtcagacacgttctgattgctaacttgccagtgtttctctttggggaatcctgggatggctctagccgttccgcagacgggatcgatttcatgattttttttgtttcgttgcatagggtttggtttgcccttttcctttatttcaatatatgccgtgcacttgtttgtcgggtcatcttttcatgcttttttttgtcttggttgtgatgatgtggtctggttgggcggtcgttctagatcggagtagaattctgtttcaaactacctggtggatttattaattttggatctgtatgtgtgtgccatacatattcatagttacgaattgaagatgatggatggaaatatcgatctaggataggtatacatgttgatgcgggttttactgatgcatatacagagatgctttttgttcgcttggttgtgatgatgtggtgtggttgggcggtcgttcattcgttctagatcggagtagaatactgtttcaaactacctggtgtatttattaattttggaactgtatgtgtgtgtcatacatcttcatagttacgagtttaagatggatggaaatatcgatctaggataggtatacatgttgatgtgggttttactgatgcatatacatgatggcatatgcagcatctattcatatgctctaaccttgagtacctatctattataataaacaagtatgttttataattattttgatcttgatatacttggatgatggcatatccagcagctatatgtggatttttttagccctgccttcatacgctatttatttgcttggtactgtttcttttgtcgatgctcaccctgttgtttggtgttacttctgcaggatcctctaagtagcagccatggacaacaaccccaacatcaacgagtgcatcccctacaactgcctgagcaaccccgaggtggaggtgctgggcggcgagcgcatcgagaccggctacacccccatcgacatcagcctgagcctgacccagttcctgctgagcgagttcgtgcccggcgccggcttcgtgctgggcctggtggacatcatctggggcatcttcggccccagccagtgggacgccttcctggtgcagatcgagcagttgataaaccaacgcatagaggaattcgcccgcaaccaggccatcagccgcctggagggcctgagcaacctgtaccaaatctacgccgagagcttccgcgagtgggaggccgaccccaccaaccccgccctgcgcgaggagatgcgcatccagttcaacgacatgaacagcgccctgaccaccgccatccccctgttcgccgtgcagaactaccaggtgcccctgctgagcgtgtacgtgcaggccgccaacctgcacctgagcgtgctgcgcgacgtcagcgtgttcggccagcgctggggcttcgacgccgccaccatcaacagccgctacaacgacctgacccgcctgatcggcaactacaccgaccacgccgtgcgctggtacaacaccggcctggagcgcgtgtgggggcccgacagccgcgactggatcaggtacaaccagttccgccgcgagctgaccctgaccgtgctggacatcgtgagcctgttccccaactacgacagccgcacctaccccatccgcaccgtgagccagctgacccgcgagatttacaccaaccccgtgctggagaacttcgacggcagcttccgcggcagcgcccagggcatcgagggcagcatccgcagcccccacctgatggacatcctgaacagcatcaccatctacaccgacgcccaccgcggcgagtactactggagcggccaccagatcatggccagccccgtcggcttcagcggccccgagttcaccttccccctgtacggcacgatgggcaacgctgcacctcagcagcgcatcgtggcacagctgggccagggagtgtaccgcaccctgagcagcaccctgtaccgtcgacctttcaacatcggcatcaacaaccagcagctgagcgtgctggacggcaccgagttcgcctacggcaccagcagcaacctgcccagcgccgtgtaccgcaagagcggcaccgtggacagcctggacgagatcccccctcagaacaacaacgtgccacctcgacagggcttcagccaccgtctgagccacgtgagcatgttccgcagtggcttcagcaacagcagcgtgagcatcatccgtgcacctatgttcagctggattcaccgcagtgccgagttcaacaacatcatccccagcagccagatcacccagatccccctgaccaagagcaccaacctgggcagcggcaccagcgtggtgaagggccccggcttcaccggcggcgacatcctgcgccgcaccagccccggccagatcagcaccctgcgcgtgaacatcaccgcccccctgagccagcgctaccgcgtccgcatccgctacgccagcaccaccaacctgcagttccacaccagcatcgacggccgccccatcaaccagggcaacttcagcgccaccatgagcagcggcagcaacctgcagagcggcagcttccgcaccgtgggcttcaccacccccttcaacttcagcaacggcagcagcgtgttcaccctgagcgcccacgtgttcaacagcggcaacgaggtgtacatcgaccgcatcgagttcgtgcccgccgaggtgaccttcgaggccgagtacgacctggagagggctcagaaggccgtgaacgagctgttcaccagcagcaaccagatcggcctgaagaccgacgtgaccgactaccacatcgaccaggtgagcaacctggtggagtgcttaagcgacgagttctgcctggacgagaagaaggagctgagcgagaaggtgaagcacgccaagcgcctgagcgacgagcgcaacctgctgcaggaccccaacttccgcggcatcaaccgccagctggaccgcggctggcgaggcagcaccgatatcaccatccagggcggcgacgacgtgttcaaggagaactacgtgaccctgctgggcaccttcgacgagtgctaccccacctacctgtaccagaagatcgacgagagcaagctgaaggcctacacccgctaccagctgcgcggctacatcgaggacagccaggacctggaaatctacctgatccgctacaacgcgaagcacgagaccgtgaacgtgcccggcaccggcagcctgtggcccctgagcgcccccagccccatcggcaagtgcactagtcaccacagccaccacttcagcctggacatcgacgtgggctgcaccgacctgaacgaggacctgggcgtgtgggtgatcttcaagatcaagacccaggacggccacgcccgcctgggcaatctagagttcctggaggagaagcccctggtgggcgaggccctggcccgcgtgaagcgtgctgagaagaagtggcgcgacaagcgcgagaagctggagtgggagaccaacatcgtgtacaaggaggccaaggagagcgtggacgccctgttcgtgaacagccagtacgaccgcctgcaggccgacaccaacatcgccatgatccacgccgccgacaagcgcgtgcacagcattcgcgaggcctacctgcccgagctgagcgtgatccccggtgtgaacgccgccatcttcgaggaactcgagggccgcatctaggagctctatgatcgttcaaacatttggcaataaagtttcttaagattgaatcctgttgccggtcttgcgatgattatcatataatttctgttgaattacgttaagcatgtaataattaacatgtaatgcatgacgttatttatgagatgggtttttatgattagagtcccgcaattatacatttaatacgcgatagaaaacaaaatatagcgcgcaaactaggataaattatcgcgcgcggtgtcatctatgttactagatcaatagactacggaccgcgatcgcttaattaagcttgcatgcctgcagtgcagcgtgacccggtcgtgcccctctctagagataatgagcattgcatgtctaagttataaaaaattaccacatattttttttgtcacacttgtttgaagtgcagtttatctatctttatacatatatttaaactttactctacgaataatataatctatagtactacaataatatcagtgttttagagaatcatataaatgaacagttagacatggtctaaaggacaattgagtattttgacaacaggactctacagttttatctttttagtgtgcatgtgttctcctttttttttgcaaatagcttcacctatataatacttcatccattttattagtacatccatttagggtttagggttaatggtttttatagactaatttttttagtacatctattttattctattttagcctctaaattaagaaaactaaaactctattttagtttttttatttaataatttagatataaaatagaataaaataaagtgactaaaaattaaacaaataccctttaagaaattaaaaaaactaaggaaacatttttcttgtttcgagtagataatgccagcctgttaaacgccgccgacgagtctaacggacaccaaccagcgaaccagcagcgtcgcgtcgggccaagcgaagcagacggcacggcatctctgtcgctgcctctggacccctctcgagagttccgctccaccgttggacttgctccgctgtcggcatccagaaattgcgtggcggagcggcagacgtgagccggcacggcaggcggcctcctcctcctctcacggcaccggcagctacgggggattcctttcccaccgctccttcgctttcccttcctcgcccgccgtaataaatagacaccccctccacaccctctttccccaacctcgtgttgttcggagcgcacacacacacaaccagatctcccccaaatccacccgtcggcacctccgcttcaaggtacgccgctcgtcctccccccccccccctctctaccttctctagatcggcgttccggtccatagttagggcccggtagttctacttctgttcatgtttgtgttagatccgtgtttgtgttagatccgtgctgttagcgttcgtacacggatgcgacctgtacgtcagacacgttctgattgctaacttgccagtgtttctctttggggaatcctgggatggctctagccgttccgcagacgggatcgatttcatgattttttttgtttcgttgcatagggtttggtttgcccttttcctttatttcaatatatgccgtgcacttgtttgtcgggtcatcttttcatgcttttttttgtcttggttgtgatgatgtggtctggttgggcggtcgttctagatcggagtagaattctgtttcaaactacctggtggatttattaattttggatctgtatgtgtgtgccatacatattcatagttacgaattgaagatgatggatggaaatatcgatctaggataggtatacatgttgatgcgggttttactgatgcatatacagagatgctttttgttcgcttggttgtgatgatgtggtgtggttgggcggtcgttcattcgttctagatcggagtagaatactgtttcaaactacctggtgtatttattaattttggaactgtatgtgtgtgtcatacatcttcatagttacgagtttaagatggatggaaatatcgatctaggataggtatacatgttgatgtgggttttactgatgcatatacatgatggcatatgcagcatctattcatatgctctaaccttgagtacctatctattataataaacaagtatgttttataattattttgatcttgatatacttggatgatggcatatgcagcagctatatgtggatttttttagccctgccttcatacgctatttatttgcttggtactgtttcttttgtcgatgctcaccctgttgtttggtgttacttctgcagggatctccgatcatgcaaaaactcattaactcagtgcaaaactatgcctggggcagcaaaacggcgttgactgaactttatggtatggaaaatccgtccagccagccgatggccgagctgtggatgggcgcacatccgaaaagcagttcacgagtgcagaatgccgccggagatatcgtttcactgcgtgatgtgattgagagtgataaatcgactctgctcggagaggccgttgccaaacgctttggcgaactgcctttcctgttcaaagtattatgcgcagcacagccactctccattcaggttcatccaaacaaacacaattctgaaatcggttttgccaaagaaaatgccgcaggtatcccgatggatgccgccgagcgtaactataaagatcctaaccacaagccggagctggtttttgcgctgacgcctttccttgcgatgaacgcgtttcgtgaattttccgagattgtctccctactccagccggtcgcaggtgcacatccggcgattgctcactttttacaacagcctgatgccgaacgtttaagcgaactgttcgccagcctgttgaatatgcagggtgaagaaaaatcccgcgcgctggcgattttaaaatcggccctcgatagccagcagggtgaaccgtggcaaacgattcgtttaatttctgaattttacccggaagacagcggtctgttctccccgctattgctgaatgtggtgaaattgaaccctggcgaagcgatgttcctgttcgctgaaacaccgcacgcttacctgcaaggcgtggcgctggaagtgatggcaaactccgataacgtgctgcgtgcgggtctgacgcctaaatacattgatattccggaactggttgccaatgtgaaattcgaagccaaaccggctaaccagttgttgacccagccggtgaaacaaggtgcagaactggacttcccgattccagtggatgattttgccttctcgctgcatgaccttagtgataaagaaaccaccattagccagcagagtgccgccattttgttctgcgtcgaaggcgatgcaacgttgtggaaaggttctcagcagttacagcttaaaccgggtgaatcagcgtttattgccgccaacgaatcaccggtgactgtcaaaggccacggccgtttagcgcgtgtttacaacaagctgtaagagcttactgaaaaaattaacatctcttgctaagctgggtcatgggtcgtttaagctgccgatgtgcctgcgtcgtctggtgccctctctccatatggaggttgtcaaagtatctgctgttcgtgtcatgagtcgtgtcagtgttggtttaataatggaccggttgtgttgtgtgtgcgtactacccagaactatgacaaatcatgaataagtttgatgtttgaaattaaagcctgtgctcattatgttctgtctttcagttgtctcctaatatttgcctccaggtactggctatctaccgtttcttacttaggaggtgtttgaatgcactaaaactaatagttagtggctaaaattagttaaaacatccaaacaccatagctaatagttgaactattagctatttttggaaaattagttaatagtgaggtagttatttgttagctagctaattcaactaacaatttttagccaactaacaattagtttcagtgcattcaaacacccccttaatgttaacgtggttctatctaccgtctcctaatatatggttgattgttcggtttgttgctatgctattgggttctgattgctgctagttcttgctgaatccagaagttctcgtagtatagctcagattcatattatttatttgagtgataagtgatccaggttattactatgttagctaggttttttttacaaggataaattatctgtgatcataattcttatgaaagctttatgtttcctggaggcagtggcatgcaatgcatgacagcaacttgatcacaccagctgaggtagatacggtaacaaggttcttaaatctgttcaccaaatcattggagaacacacatacacattcttgccagtcttggttagagaaatttcatgacaaaatgccaaagctgtcttgactcttcacttttggccatgagtcgtgacttagtttggtttaatggaccggttctcctagcttgttctactcaaaactgttgttgatgcgaataagttgtgatggttgatctctggattttgttttgctctcaatagtggacgagattagatagcctgcaggcccgggggcgcgccctaattagctaacggccaggatcgccgcgtgagcctttagcaactagctagattaattaacgcaatctgttattaagttgtctaagcgtcaatttgtttacaccacaatatatcctgccaccagccagccaacagctccccgaccggcagctcggcacaaaatcaccactcgatacaggcagcccatcagaattaattctcatgtttgacagcttatcatcgactgcacggtgcaccaatgcttctggcgtcaggcagccatcggaagctgtggtatggctgtgcaggtcgtaaatcactgcataattcgtgtcgctcaaggcgcactcccgttctggataatgttttttgcgccgacatcataacggttctggcaaatattctgaaatgagctgttgacaattaatcatccggctcgtataatgtgtggaattgtgagcggataacaatttcacacaggaaacagaccatgagggaagcgttgatcgccgaagtatcgactcaactatcagaggtagttggcgtcatcgagcgccatctcgaaccgacgttgctggccgtacatttgtacggctccgcagtggatggcggcctgaagccacacagtgatattgatttgctggttacggtgaccgtaaggcttgatgaaacaacgcggcgagctttgatcaacgaccttttggaaacttcggcttcccctggagagagcgagattctccgcgctgtagaagtcaccattgttgtgcacgacgacatcattccgtggcgttatccagctaagcgcgaactgcaatttggagaatggcagcgcaatgacattcttgcaggtatcttcgagccagccacgatcgacattgatctggctatcttgctgacaaaagcaagagaacatagcgttgccttggtaggtccagcggcggaggaactctttgatccggttcctgaacaggatctatttgaggcgctaaatgaaaccttaacgctatggaactcgccgcccgactgggctggcgatgagcgaaatgtagtgcttacgttgtcccgcatttggtacagcgcagtaaccggcaaaatcgcgccgaaggatgtcgctgccgactgggcaatggagcgcctgccggcccagtatcagcccgtcatacttgaagctaggcaggcttatcttggacaagaagatcgcttggcctcgcgcgcagatcagttggaagaatttgttcactacgtgaaaggcgagatcaccaaagtagtcggcaaataaagctctagtggatctccgtacccagggatctggctcgcggcggacgcacgacgccggggcgagaccataggcgatctcctaaatcaatagtagctgtaacctcgaagcgtttcacttgtaacaacgattgagaatttttgtcataaaattgaaatacttggttcgcatttttgtcatccgcggtcagccgcaattctgacgaactgcccatttagctggagatgattgtacatccttcacgtgaaaatttctcaagcgctgtgaacaagggttcagattttagattgaaaggtgagccgttgaaacacgttcttcttgtcgatgacgacgtcgctatgcggcatcttattattgaataccttacgatccacgccttcaaagtgaccgcggtagccgacagcacccagttcacaagagtactctcttccgcgacggtcgatgtcgtggttgttgatctagatttaggtcgtgaagatgggctcgagatcgttcgtaatctggcggcaaagtctgatattccaatcataattatcagtggcgaccgccttgaggagacggataaagttgttgcactcgagctaggagcaagtgattttatcgctaagccgttcagtatcagagagtttctagcacgcattcgggttgccttgcgcgtgcgccccaacgttgtccgctccaaagaccgacggtctttttgttttactgactggacacttaatctcaggcaacgtcgcttgatgtccgaagctggcggtgaggtgaaacttacggcaggtgagttcaatcttctcctcgcgtttttagagaaaccccgcgacgttctatcgcgcgagcaacttctcattgccagtcgagtacgcgacgaggaggtttatgacaggagtatagatgttctcattttgaggctgcgccgcaaacttgaggcagatccgtcaagccctcaactgataaaaacagcaagaggtgccggttatttctttgacgcggacgtgcaggtttcgcacggggggacgatggcagcctgagccaattcccagatccccgaggaatcggcgtgagcggtcgcaaaccatccggcccggtacaaatcggcgcggcgctgggtgatgacctggtggagaagttgaaggccgcgcaggccgcccagcggcaacgcatcgaggcagaagcacgccccggtgaatcgtggcaagcggccgctgatcgaatccgcaaagaatcccggcaaccgccggcagccggtgcgccgtcgattaggaagccgcccaagggcgacgagcaaccagattttttcgttccgatgctctatgacgtgggcacccgcgatagtcgcagcatcatggacgtggccgttttccgtctgtcgaagcgtgaccgacgagctggcgaggtgatccgctacgagcttccagacgggcacgtagaggtttccgcagggccggccggcatggccagtgtgtgggattacgacctggtactgatggcggtttcccatctaaccgaatccatgaaccgataccgggaagggaagggagacaagcccggccgcgtgttccgtccacacgttgcggacgtactcaagttctgccggcgagccgatggcggaaagcagaaagacgacctggtagaaacctgcattcggttaaacaccacgcacgttgccatgcagcgtacgaagaaggccaagaacggccgcctggtgacggtatccgagggtgaagccttgattagccgctacaagatcgtaaagagcgaaaccgggcggccggagtacatcgagatcgagctggctgattggatgtaccgcgagatcacagaaggcaagaacccggacgtgctgacggttcaccccgattactttttgatcgatcccggcatcggccgttttctctaccgcctggcacgccgcgccgcaggcaaggcagaagccagatggttgttcaagacgatctacgaacgcagtggcagcgccggagagttcaagaagttctgtttcaccgtgcgcaagctgatcgggtcaaatgacctgccggagtacgatttgaaggaggaggcggggcaggctggcccgatcctagtcatgcgctaccgcaacctgatcgagggcgaagcatccgccggttcctaatgtacggagcagatgctagggcaaattgccctagcaggggaaaaaggtcgaaaaggtctctttcctgtggatagcacgtacattgggaacccaaagccgtacattgggaaccggaacccgtacattgggaacccaaagccgtacattgggaaccggtcacacatgtaagtgactgatataaaagagaaaaaaggcgatttttccgcctaaaactctttaaaacttattaaaactcttaaaacccgcctggcctgtgcataactgtctggccagcgcacagccgaagagctgcaaaaagcgcctacccttcggtcgctgcgctccctacgccccgccgcttcgcgtcggcctatcgcggccgctggccgctcaaaaatggctggcctacggccaggcaatctaccagggcgcggacaagccgcgccgtcgccactcgaccgccggcgctgaggtctgcctcgtgaagaaggtgttgctgactcataccaggcctgaatcgccccatcatccagccagaaagtgagggagccacggttgatgagagctttgttgtaggtggaccagttggtgattttgaacttttgctttgccacggaacggtctgcgttgtcgggaagatgcgtgatctgatccttcaactcagcaaaagttcgatttattcaacaaagccgccgtcccgtcaagtcagcgtaatgctctgccagtgttacaaccaattaaccaattctgattagaaaaactcatcgagcatcaaatgaaactgcaatttattcatatcaggattatcaataccatatttttgaaaaagccgtttctgtaatgaaggagaaaactcaccgaggcagttccataggatggcaagatcctggtatcggtctgcgattccgactcgtccaacatcaatacaacctattaatttcccctcgtcaaaaataaggttatcaagtgagaaatcaccatgagtgacgactgaatccggtgagaatggcaaaagctctgcattaatgaatcggccaacgcgcggggagaggcggtttgcgtattgggcgctcttccgcttcctcgctcactgactcgctgcgctcggtcgttcggctgcggcgagcggtatcagctcactcaaaggcggtaatacggttatccacagaatcaggggataacgcaggaaagaacatgtgagcaaaaggccagcaaaaggccaggaaccgtaaaaaggccgcgttgctggcgtttttccataggctccgcccccctgacgagcatcacaaaaatcgacgctcaagtcagaggtggcgaaacccgacaggactataaagataccaggcgtttccccctggaagctccctcgtgcgctctcctgttccgaccctgccgcttaccggatacctgtccgcctttctcccttcgggaagcgtggcgctttctcatagctcacgctgtaggtatctcagttcggtgtaggtcgttcgctccaagctgggctgtgtgcacgaaccccccgttcagcccgaccgctgcgccttatccggtaactatcgtcttgagtccaacccggtaagacacgacttatcgccactggcagcagccactggtaacaggattagcagagcgaggtatgtaggcggtgctacagagttcttgaagtggtggcctaactacggctacactagaagaacagtatttggtatctgcgctctgctgaagccagttaccttcggaaaaagagttggtagctcttgatccggcaaacaaaccaccgctggtagcggtggtttttttgtttgcaagcagcagattacgcgcagaaaaaaaggatctcaagaagatcctttgatcttttctacggggtctgacgctcagtggaacgaaaactcacgttaagggattttggtcatgagattatcaaaaaggatcttcacctagatccttttgatccggaatta

SEQ ID NO: 55 - DNA, 15030 bp, Artificial Sequence
  Vector 24381
attcctgtggttggcatgcacatacaaatggacgaacggataaaccttttcacgcccttttaaatatccgattattctaataaacgctcttttctcttaggtttacccgccaatatatcctgtcaaacactgatagtttaaactggcactagcctaacggtgttgactaactaggccgcttccctaattagctaacccgggggcgcgccgggaccctaattagctaaggtacctgcagtgcagcgtgacccggtcgtgcccctctctagagataatgagcattgcatgtctaagttataaaaaattaccacatattttttttgtcacacttgtttgaagtgcagtttatctatctttatacatatatttaaactttactctacgaataatataatctatagtactacaataatatcagtgttttagagaatcatataaatgaacagttagacatggtctaaaggacaattgagtattttgacaacaggactctacagttttatctttttagtgtgcatgtgttctcctttttttttgcaaatagcttcacctatataatacttcatccattttattagtacatccatttagggtttagggttaatggtttttatagactaatttttttagtacatctattttattctattttagcctctaaattaagaaaactaaaactctattttagtttttttatttaataatttagatataaaatagaataaaataaagtgactaaaaattaaacaaataccctttaagaaattaaaaaaactaaggaaacatttttcttgtttcgagtagataatgccagcctgttaaacgccgtcgacgagtctaacggacaccaaccagcgaaccagcagcgtcgcgtcgggccaagcgaagcagacggcacggcatctctgtcgctgcctctggacccctctcgagagttccgctccaccgttggacttgctccgctgtcggcatccagaaattgcgtggcggagcggcagacgtgagccggcacggcaggcggcctcctcctcctctcacggcaccggcagctacgggggattcctttcccaccgctccttcgctttcccttcctcgcccgccgtaataaatagacaccccctccacaccctctttccccaacctcgtgttgttcggagcgcacacacacacaaccagatctcccccaaatccacccgtcggcacctccgcttcctagcatctctgttgcctttttgattgaaccgtgccaacagcttgttggatttactaggtacgccgctcgtcctccccccccccccctctctaccttctctagatcggcgttccggtccatagttagggcccggtagttctacttctgttcatgtttgtgttagatccgtgtttgtgttagatccgtgctgctagcgttcgtacacggatgcgacctgtacgtcagacacgttctgattgctaacttgccagtgtttctctttggggaatcctgggatggctctagccgttccgcagacgggatcgatttcatgattttttttgtttcgttgcatagggtttggtttgcccttttcctttatttcaatatatgccgtgcacttgtttgtcgggtcatcttttcatgcttttttttgtcttggttgtgatgatgtggtctggttgggcggtcgttctagatcggagtagaattctgtttcaaactacctggtggatttattaattttggatctgtatgtgtgtgccatacatattcatagttacgaattgaagatgatggatggaaatatcgatctaggataggtatacatgttgatgcgggttttactgatgcatatacagagatgctttttgttcgcttggttgtgatgatgtggtgtggttgggcggtcgttcattcgttctagatcggagtagaatactgtttcaaactacctggtgtatttattaattttggaactgtatgtgtgtgtcatacatcttcatagttacgagtttaagatggatggaaatatcgatctaggataggtatacatgttgatgtgggttttactgatgcatatacatgatggcatatgcagcatctattcatatgctctaaccttgagtacctatctattataataaacaagtatgttttataattattttgatcttgatatacttggatgatggcatatccagcagctatatgtggatttttttagccctgccttcatacgctatttatttgcttggtactgtttcttttgtcgatgctcaccctgttgtttggtgttacttctgcaggatcctctaagtagcagccatggacaacaaccccaacatcaacgagtgcatcccctacaactgcctgagcaaccccgaggtggaggtgctgggcggcgagcgcatcgagaccggctacacccccatcgacatcagcctgagcctgacccagttcctgctgagcgagttcgtgcccggcgccggcttcgtgctgggcctggtggacatcatctggggcatcttcggccccagccagtgggacgccttcctggtgcagatcgagcagttgataaaccaacgcatagaggaattcgcccgcaaccaggccatcagccgcctggagggcctgagcaacctgtaccaaatctacgccgagagcttccgcgagtgggaggccgaccccaccaaccccgccctgcgcgaggagatgcgcatccagttcaacgacatgaacagcgccctgaccaccgccatccccctgttcgccgtgcagaactaccaggtgcccctgctgagcgtgtacgtgcaggccgccaacctgcacctgagcgtgctgcgcgacgtcagcgtgttcggccagcgctggggcttcgacgccgccaccatcaacagccgctacaacgacctgacccgcctgatcggcaactacaccgaccacgccgtgcgctggtacaacaccggcctggagcgcgtgtgggggcccgacagccgcgactggatcaggtacaaccagttccgccgcgagctgaccctgaccgtgctggacatcgtgagcctgttccccaactacgacagccgcacctaccccatccgcaccgtgagccagctgacccgcgagatttacaccaaccccgtgctggagaacttcgacggcagcttccgcggcagcgcccagggcatcgagggcagcatccgcagcccccacctgatggacatcctgaacagcatcaccatctacaccgacgcccaccgcggcgagtactactggagcggccaccagatcatggccagccccgtcggcttcagcggccccgagttcaccttccccctgtacggcacgatgggcaacgctgcacctcagcagcgcatcgtggcacagctgggccagggagtgtaccgcaccctgagcagcaccctgtaccgtcgacctttcaacatcggcatcaacaaccagcagctgagcgtgctggacggcaccgagttcgcctacggcaccagcagcaacctgcccagcgccgtgtaccgcaagagcggcaccgtggacagcctggacgagatcccccctcagaacaacaacgtgccacctcgacagggcttcagccaccgtctgagccacgtgagcatgttccgcagtggcttcagcaacagcagcgtgagcatcatccgtgcacctatgttcagctggattcaccgcagtgccgagttcaacaacatcatccccagcagccagatcacccagatccccctgaccaagagcaccaacctgggcagcggcaccagcgtggtgaagggccccggcttcaccggcggcgacatcctgcgccgcaccagccccggccagatcagcaccctgcgcgtgaacatcaccgcccccctgagccagcgctaccgcgtccgcatccgctacgccagcaccaccaacctgcagttccacaccagcatcgacggccgccccatcaaccagggcaacttcagcgccaccatgagcagcggcagcaacctgcagagcggcagcttccgcaccgtgggcttcaccacccccttcaacttcagcaacggcagcagcgtgttcaccctgagcgcccacgtgttcaacagcggcaacgaggtgtacatcgaccgcatcgagttcgtgcccgccgaggtgaccttcgaggccgagtacgacctggagagggctcagaaggccgtgaacgagctgttcaccagcagcaaccagatcggcctgaagaccgacgtgaccgactaccacatcgaccaggtgagcaacctggtggagtgcttaagcgacgagttctgcctggacgagaagaaggagctgagcgagaaggtgaagcacgccaagcgcctgagcgacgagcgcaacctgctgcaggaccccaacttccgcggcatcaaccgccagctggaccgcggctggcgaggcagcaccgatatcaccatccagggcggcgacgacgtgttcaaggagaactacgtgaccctgctgggcaccttcgacgagtgctaccccacctacctgtaccagaagatcgacgagagcaagctgaaggcctacacccgctaccagctgcgcggctacatcgaggacagccaggacctggaaatctacctgatccgctacaacgcgaagcacgagaccgtgaacgtgcccggcaccggcagcctgtggcccctgagcgcccccagccccatcggcaagtgcactagtcaccacagccaccacttcagcctggacatcgacgtgggctgcaccgacctgaacgaggacctgggcgtgtgggtgatcttcaagatcaagacccaggacggccacgcccgcctgggcaatctagagttcctggaggagaagcccctggtgggcgaggccctggcccgcgtgaagcgtgctgagaagaagtggcgcgacaagcgcgagaagctggagtgggagaccaacatcgtgtacaaggaggccaaggagagcgtggacgccctgttcgtgaacagccagtacgaccgcctgcaggccgacaccaacatcgccatgatccacgccgccgacaagcgcgtgcacagcattcgcgaggcctacctgcccgagctgagcgtgatccccggtgtgaacgccgccatcttcgaggaactcgagggccgcatctaggagctctatgatcgttcaaacatttggcaataaagtttcttaagattgaatcctgttgccggtcttgcgatgattatcatataatttctgttgaattacgttaagcatgtaataattaacatgtaatgcatgacgttatttatgagatgggtttttatgattagagtcccgcaattatacatttaatacgcgatagaaaacaaaatatagcgcgcaaactaggataaattatcgcgcgcggtgtcatctatgttactagatcaatagactacggaccgcgatcgcttaattaagcttgcatgcctgcagtgcagcgtgacccggtcgtgcccctctctagagataatgagcattgcatgtctaagttataaaaaattaccacatattttttttgtcacacttgtttgaagtgcagtttatctatctttatacatatatttaaactttactctacgaataatataatctatagtactacaataatatcagtgttttagagaatcatataaatgaacagttagacatggtctaaaggacaattgagtattttgacaacaggactctacagttttatctttttagtgtgcatgtgttctcctttttttttgcaaatagcttcacctatataatacttcatccattttattagtacatccatttagggtttagggttaatggtttttatagactaatttttttagtacatctattttattctattttagcctctaaattaagaaaactaaaactctattttagtttttttatttaataatttagatataaaatagaataaaataaagtgactaaaaattaaacaaataccctttaagaaattaaaaaaactaaggaaacatttttcttgtttcgagtagataatgccagcctgttaaacgccgccgacgagtctaacggacaccaaccagcgaaccagcagcgtcgcgtcgggccaagcgaagcagacggcacggcatctctgtcgctgcctctggacccctctcgagagttccgctccaccgttggacttgctccgctgtcggcatccagaaattgcgtggcggagcggcagacgtgagccggcacggcaggcggcctcctcctcctctcacggcaccggcagctacgggggattcctttcccaccgctccttcgctttcccttcctcgcccgccgtaataaatagacaccccctccacaccctctttccccaacctcgtgttgttcggagcgcacacacacacaaccagatctcccccaaatccacccgtcggcacctccgcttcaaggtacgccgctcgtcctccccccccccccctctctaccttctctagatcggcgttccggtccatagttagggcccggtagttctacttctgttcatgtttgtgttagatccgtgtttgtgttagatccgtgctgttagcgttcgtacacggatgcgacctgtacgtcagacacgttctgattgctaacttgccagtgtttctctttggggaatcctgggatggctctagccgttccgcagacgggatcgatttcatgattttttttgtttcgttgcatagggtttggtttgcccttttcctttatttcaatatatgccgtgcacttgtttgtcgggtcatcttttcatgcttttttttgtcttggttgtgatgatgtggtctggttgggcggtcgttctagatcggagtagaattctgtttcaaactacctggtggatttattaattttggatctgtatgtgtgtgccatacatattcatagttacgaattgaagatgatggatggaaatatcgatctaggataggtatacatgttgatgcgggttttactgatgcatatacagagatgctttttgttcgcttggttgtgatgatgtggtgtggttgggcggtcgttcattcgttctagatcggagtagaatactgtttcaaactacctggtgtatttattaattttggaactgtatgtgtgtgtcatacatcttcatagttacgagtttaagatggatggaaatatcgatctaggataggtatacatgttgatgtgggttttactgatgcatatacatgatggcatatgcagcatctattcatatgctctaaccttgagtacctatctattataataaacaagtatgttttataattattttgatcttgatatacttggatgatggcatatgcagcagctatatgtggatttttttagccctgccttcatacgctatttatttgcttggtactgtttcttttgtcgatgctcaccctgttgtttggtgttacttctgcagggatctccgatcatgcaaaaactcattaactcagtgcaaaactatgcctggggcagcaaaacggcgttgactgaactttatggtatggaaaatccgtccagccagccgatggccgagctgtggatgggcgcacatccgaaaagcagttcacgagtgcagaatgccgccggagatatcgtttcactgcgtgatgtgattgagagtgataaatcgactctgctcggagaggccgttgccaaacgctttggcgaactgcctttcctgttcaaagtattatgcgcagcacagccactctccattcaggttcatccaaacaaacacaattctgaaatcggttttgccaaagaaaatgccgcaggtatcccgatggatgccgccgagcgtaactataaagatcctaaccacaagccggagctggtttttgcgctgacgcctttccttgcgatgaacgcgtttcgtgaattttccgagattgtctccctactccagccggtcgcaggtgcacatccggcgattgctcactttttacaacagcctgatgccgaacgtttaagcgaactgttcgccagcctgttgaatatgcagggtgaagaaaaatcccgcgcgctggcgattttaaaatcggccctcgatagccagcagggtgaaccgtggcaaacgattcgtttaatttctgaattttacccggaagacagcggtctgttctccccgctattgctgaatgtggtgaaattgaaccctggcgaagcgatgttcctgttcgctgaaacaccgcacgcttacctgcaaggcgtggcgctggaagtgatggcaaactccgataacgtgctgcgtgcgggtctgacgcctaaatacattgatattccggaactggttgccaatgtgaaattcgaagccaaaccggctaaccagttgttgacccagccggtgaaacaaggtgcagaactggacttcccgattccagtggatgattttgccttctcgctgcatgaccttagtgataaagaaaccaccattagccagcagagtgccgccattttgttctgcgtcgaaggcgatgcaacgttgtggaaaggttctcagcagttacagcttaaaccgggtgaatcagcgtttattgccgccaacgaatcaccggtgactgtcaaaggccacggccgtttagcgcgtgtttacaacaagctgtaagagcttactgaaaaaattaacatctcttgctaagctgggtcatgggtcgtttaagctgccgatgtgcctgcgtcgtctggtgccctctctccatatggaggttgtcaaagtatctgctgttcgtgtcatgagtcgtgtcagtgttggtttaataatggaccggttgtgttgtgtgtgcgtactacccagaactatgacaaatcatgaataagtttgatgtttgaaattaaagcctgtgctcattatgttctgtctttcagttgtctcctaatatttgcctccaggtactggctatctaccgtttcttacttaggaggtgtttgaatgcactaaaactaatagttagtggctaaaattagttaaaacatccaaacaccatagctaatagttgaactattagctatttttggaaaattagttaatagtgaggtagttatttgttagctagctaattcaactaacaatttttagccaactaacaattagtttcagtgcattcaaacacccccttaatgttaacgtggttctatctaccgtctcctaatatatggttgattgttcggtttgttgctatgctattgggttctgattgctgctagttcttgctgaatccagaagttctcgtagtatagctcagattcatattatttatttgagtgataagtgatccaggttattactatgttagctaggttttttttacaaggataaattatctgtgatcataattcttatgaaagctttatgtttcctggaggcagtggcatgcaatgcatgacagcaacttgatcacaccagctgaggtagatacggtaacaaggttcttaaatctgttcaccaaatcattggagaacacacatacacattcttgccagtcttggttagagaaatttcatgacaaaatgccaaagctgtcttgactcttcacttttggccatgagtcgtgacttagtttggtttaatggaccggttctcctagcttgttctactcaaaactgttgttgatgcgaataagttgtgatggttgatctctggattttgttttgctctcaatagtggacgagattagatagcctgcaggcccgggggcgcgccctaattagctaacggccaggatcgccgcgtgagcctttagcaactagctagattaattaacgcaatctgttattaagttgtctaagcgtcaatttgtttacaccacaatatatcctgccaccagccagccaacagctccccgaccggcagctcggcacaaaatcaccactcgatacaggcagcccatcagaattaattctcatgtttgacagcttatcatcgactgcacggtgcaccaatgcttctggcgtcaggcagccatcggaagctgtggtatggctgtgcaggtcgtaaatcactgcataattcgtgtcgctcaaggcgcactcccgttctggataatgttttttgcgccgacatcataacggttctggcaaatattctgaaatgagctgttgacaattaatcatccggctcgtataatgtgtggaattgtgagcggataacaatttcacacaggaaacagaccatgagggaagcgttgatcgccgaagtatcgactcaactatcagaggtagttggcgtcatcgagcgccatctcgaaccgacgttgctggccgtacatttgtacggctccgcagtggatggcggcctgaagccacacagtgatattgatttgctggttacggtgaccgtaaggcttgatgaaacaacgcggcgagctttgatcaacgaccttttggaaacttcggcttcccctggagagagcgagattctccgcgctgtagaagtcaccattgttgtgcacgacgacatcattccgtggcgttatccagctaagcgcgaactgcaatttggagaatggcagcgcaatgacattcttgcaggtatcttcgagccagccacgatcgacattgatctggctatcttgctgacaaaagcaagagaacatagcgttgccttggtaggtccagcggcggaggaactctttgatccggttcctgaacaggatctatttgaggcgctaaatgaaaccttaacgctatggaactcgccgcccgactgggctggcgatgagcgaaatgtagtgcttacgttgtcccgcatttggtacagcgcagtaaccggcaaaatcgcgccgaaggatgtcgctgccgactgggcaatggagcgcctgccggcccagtatcagcccgtcatacttgaagctaggcaggcttatcttggacaagaagatcgcttggcctcgcgcgcagatcagttggaagaatttgttcactacgtgaaaggcgagatcaccaaagtagtcggcaaataaagctctagtggatctccgtacccagggatctggctcgcggcggacgcacgacgccggggcgagaccataggcgatctcctaaatcaatagtagctgtaacctcgaagcgtttcacttgtaacaacgattgagaatttttgtcataaaattgaaatacttggttcgcatttttgtcatccgcggtcagccgcaattctgacgaactgcccatttagctggagatgattgtacatccttcacgtgaaaatttctcaagcgctgtgaacaagggttcagattttagattgaaaggtgagccgttgaaacacgttcttcttgtcgatgacgacgtcgctatgcggcatcttattattgaataccttacgatccacgccttcaaagtgaccgcggtagccgacagcacccagttcacaagagtactctcttccgcgacggtcgatgtcgtggttgttgatctagatttaggtcgtgaagatgggctcgagatcgttcgtaatctggcggcaaagtctgatattccaatcataattatcagtggcgaccgccttgaggagacggataaagttgttgcactcgagctaggagcaagtgattttatcgctaagccgttcagtatcagagagtttctagcacgcattcgggttgccttgcgcgtgcgccccaacgttgtccgctccaaagaccgacggtctttttgttttactgactggacacttaatctcaggcaacgtcgcttgatgtccgaagctggcggtgaggtgaaacttacggcaggtgagttcaatcttctcctcgcgtttttagagaaaccccgcgacgttctatcgcgcgagcaacttctcattgccagtcgagtacgcgacgaggaggtttatgacaggagtatagatgttctcattttgaggctgcgccgcaaacttgaggcagatccgtcaagccctcaactgataaaaacagcaagaggtgccggttatttctttgacgcggacgtgcaggtttcgcacggggggacgatggcagcctgagccaattcccagatccccgaggaatcggcgtgagcggtcgcaaaccatccggcccggtacaaatcggcgcggcgctgggtgatgacctggtggagaagttgaaggccgcgcaggccgcccagcggcaacgcatcgaggcagaagcacgccccggtgaatcgtggcaagcggccgctgatcgaatccgcaaagaatcccggcaaccgccggcagccggtgcgccgtcgattaggaagccgcccaagggcgacgagcaaccagattttttcgttccgatgctctatgacgtgggcacccgcgatagtcgcagcatcatggacgtggccgttttccgtctgtcgaagcgtgaccgacgagctggcgaggtgatccgctacgagcttccagacgggcacgtagaggtttccgcagggccggccggcatggccagtgtgtgggattacgacctggtactgatggcggtttcccatctaaccgaatccatgaaccgataccgggaagggaagggagacaagcccggccgcgtgttccgtccacacgttgcggacgtactcaagttctgccggcgagccgatggcggaaagcagaaagacgacctggtagaaacctgcattcggttaaacaccacgcacgttgccatgcagcgtacgaagaaggccaagaacggccgcctggtgacggtatccgagggtgaagccttgattagccgctacaagatcgtaaagagcgaaaccgggcggccggagtacatcgagatcgagctggctgattggatgtaccgcgagatcacagaaggcaagaacccggacgtgctgacggttcaccccgattactttttgatcgatcccggcatcggccgttttctctaccgcctggcacgccgcgccgcaggcaaggcagaagccagatggttgttcaagacgatctacgaacgcagtggcagcgccggagagttcaagaagttctgtttcaccgtgcgcaagctgatcgggtcaaatgacctgccggagtacgatttgaaggaggaggcggggcaggctggcccgatcctagtcatgcgctaccgcaacctgatcgagggcgaagcatccgccggttcctaatgtacggagcagatgctagggcaaattgccctagcaggggaaaaaggtcgaaaaggtctctttcctgtggatagcacgtacattgggaacccaaagccgtacattgggaaccggaacccgtacattgggaacccaaagccgtacattgggaaccggtcacacatgtaagtgactgatataaaagagaaaaaaggcgatttttccgcctaaaactctttaaaacttattaaaactcttaaaacccgcctggcctgtgcataactgtctggccagcgcacagccgaagagctgcaaaaagcgcctacccttcggtcgctgcgctccctacgccccgccgcttcgcgtcggcctatcgcggccgctggccgctcaaaaatggctggcctacggccaggcaatctaccagggcgcggacaagccgcgccgtcgccactcgaccgccggcgctgaggtctgcctcgtgaagaaggtgttgctgactcataccaggcctgaatcgccccatcatccagccagaaagtgagggagccacggttgatgagagctttgttgtaggtggaccagttggtgattttgaacttttgctttgccacggaacggtctgcgttgtcgggaagatgcgtgatctgatccttcaactcagcaaaagttcgatttattcaacaaagccgccgtcccgtcaagtcagcgtaatgctctgccagtgttacaaccaattaaccaattctgattagaaaaactcatcgagcatcaaatgaaactgcaatttattcatatcaggattatcaataccatatttttgaaaaagccgtttctgtaatgaaggagaaaactcaccgaggcagttccataggatggcaagatcctggtatcggtctgcgattccgactcgtccaacatcaatacaacctattaatttcccctcgtcaaaaataaggttatcaagtgagaaatcaccatgagtgacgactgaatccggtgagaatggcaaaagctctgcattaatgaatcggccaacgcgcggggagaggcggtttgcgtattgggcgctcttccgcttcctcgctcactgactcgctgcgctcggtcgttcggctgcggcgagcggtatcagctcactcaaaggcggtaatacggttatccacagaatcaggggataacgcaggaaagaacatgtgagcaaaaggccagcaaaaggccaggaaccgtaaaaaggccgcgttgctggcgtttttccataggctccgcccccctgacgagcatcacaaaaatcgacgctcaagtcagaggtggcgaaacccgacaggactataaagataccaggcgtttccccctggaagctccctcgtgcgctctcctgttccgaccctgccgcttaccggatacctgtccgcctttctcccttcgggaagcgtggcgctttctcatagctcacgctgtaggtatctcagttcggtgtaggtcgttcgctccaagctgggctgtgtgcacgaaccccccgttcagcccgaccgctgcgccttatccggtaactatcgtcttgagtccaacccggtaagacacgacttatcgccactggcagcagccactggtaacaggattagcagagcgaggtatgtaggcggtgctacagagttcttgaagtggtggcctaactacggctacactagaagaacagtatttggtatctgcgctctgctgaagccagttaccttcggaaaaagagttggtagctcttgatccggcaaacaaaccaccgctggtagcggtggtttttttgtttgcaagcagcagattacgcgcagaaaaaaaggatctcaagaagatcctttgatcttttctacggggtctgacgctcagtggaacgaaaactcacgttaagggattttggtcatgagattatcaaaaaggatcttcacctagatccttttgatccggaatta

SEQ ID NO: 56 - DNA, 15030 bp, Artificial Sequence
  Vector 24383
attcctgtggttggcatgcacatacaaatggacgaacggataaaccttttcacgcccttttaaatatccgattattctaataaacgctcttttctcttaggtttacccgccaatatatcctgtcaaacactgatagtttaaactggcactagcctaacggtgttgactaactaggccgcttccctaattagctaacccgggggcgcgccgggaccctaattagctaaggtacctgcagtgcagcgtgacccggtcgtgcccctctctagagataatgagcattgcatgtctaagttataaaaaattaccacatattttttttgtcacacttgtttgaagtgcagtttatctatctttatacatatatttaaactttactctacgaataatataatctatagtactacaataatatcagtgttttagagaatcatataaatgaacagttagacatggtctaaaggacaattgagtattttgacaacaggactctacagttttatctttttagtgtgcatgtgttctcctttttttttgcaaatagcttcacctatataatacttcatccattttattagtacatccatttagggtttagggttaatggtttttatagactaatttttttagtacatctattttattctattttagcctctaaattaagaaaactaaaactctattttagtttttttatttaataatttagatataaaatagaataaaataaagtgactaaaaattaaacaaataccctttaagaaattaaaaaaactaaggaaacatttttcttgtttcgagtagataatgccagcctgttaaacgccgtcgacgagtctaacggacaccaaccagcgaaccagcagcgtcgcgtcgggccaagcgaagcagacggcacggcatctctgtcgctgcctctggacccctctcgagagttccgctccaccgttggacttgctccgctgtcggcatccagaaattgcgtggcggagcggcagacgtgagccggcacggcaggcggcctcctcctcctctcacggcaccggcagctacgggggattcctttcccaccgctccttcgctttcccttcctcgcccgccgtaataaatagacaccccctccacaccctctttccccaacctcgtgttgttcggagcgcacacacacacaaccagatctcccccaaatccacccgtcggcacctccgcttcctagtcctttctctctctttctttctctctgctttattgaacttctcaaagttactaggtacgccgctcgtcctccccccccccccctctctaccttctctagatcggcgttccggtccatagttagggcccggtagttctacttctgttcatgtttgtgttagatccgtgtttgtgttagatccgtgctgctagcgttcgtacacggatgcgacctgtacgtcagacacgttctgattgctaacttgccagtgtttctctttggggaatcctgggatggctctagccgttccgcagacgggatcgatttcatgattttttttgtttcgttgcatagggtttggtttgcccttttcctttatttcaatatatgccgtgcacttgtttgtcgggtcatcttttcatgcttttttttgtcttggttgtgatgatgtggtctggttgggcggtcgttctagatcggagtagaattctgtttcaaactacctggtggatttattaattttggatctgtatgtgtgtgccatacatattcatagttacgaattgaagatgatggatggaaatatcgatctaggataggtatacatgttgatgcgggttttactgatgcatatacagagatgctttttgttcgcttggttgtgatgatgtggtgtggttgggcggtcgttcattcgttctagatcggagtagaatactgtttcaaactacctggtgtatttattaattttggaactgtatgtgtgtgtcatacatcttcatagttacgagtttaagatggatggaaatatcgatctaggataggtatacatgttgatgtgggttttactgatgcatatacatgatggcatatgcagcatctattcatatgctctaaccttgagtacctatctattataataaacaagtatgttttataattattttgatcttgatatacttggatgatggcatatccagcagctatatgtggatttttttagccctgccttcatacgctatttatttgcttggtactgtttcttttgtcgatgctcaccctgttgtttggtgttacttctgcaggatcctctaagtagcagccatggacaacaaccccaacatcaacgagtgcatcccctacaactgcctgagcaaccccgaggtggaggtgctgggcggcgagcgcatcgagaccggctacacccccatcgacatcagcctgagcctgacccagttcctgctgagcgagttcgtgcccggcgccggcttcgtgctgggcctggtggacatcatctggggcatcttcggccccagccagtgggacgccttcctggtgcagatcgagcagttgataaaccaacgcatagaggaattcgcccgcaaccaggccatcagccgcctggagggcctgagcaacctgtaccaaatctacgccgagagcttccgcgagtgggaggccgaccccaccaaccccgccctgcgcgaggagatgcgcatccagttcaacgacatgaacagcgccctgaccaccgccatccccctgttcgccgtgcagaactaccaggtgcccctgctgagcgtgtacgtgcaggccgccaacctgcacctgagcgtgctgcgcgacgtcagcgtgttcggccagcgctggggcttcgacgccgccaccatcaacagccgctacaacgacctgacccgcctgatcggcaactacaccgaccacgccgtgcgctggtacaacaccggcctggagcgcgtgtgggggcccgacagccgcgactggatcaggtacaaccagttccgccgcgagctgaccctgaccgtgctggacatcgtgagcctgttccccaactacgacagccgcacctaccccatccgcaccgtgagccagctgacccgcgagatttacaccaaccccgtgctggagaacttcgacggcagcttccgcggcagcgcccagggcatcgagggcagcatccgcagcccccacctgatggacatcctgaacagcatcaccatctacaccgacgcccaccgcggcgagtactactggagcggccaccagatcatggccagccccgtcggcttcagcggccccgagttcaccttccccctgtacggcacgatgggcaacgctgcacctcagcagcgcatcgtggcacagctgggccagggagtgtaccgcaccctgagcagcaccctgtaccgtcgacctttcaacatcggcatcaacaaccagcagctgagcgtgctggacggcaccgagttcgcctacggcaccagcagcaacctgcccagcgccgtgtaccgcaagagcggcaccgtggacagcctggacgagatcccccctcagaacaacaacgtgccacctcgacagggcttcagccaccgtctgagccacgtgagcatgttccgcagtggcttcagcaacagcagcgtgagcatcatccgtgcacctatgttcagctggattcaccgcagtgccgagttcaacaacatcatccccagcagccagatcacccagatccccctgaccaagagcaccaacctgggcagcggcaccagcgtggtgaagggccccggcttcaccggcggcgacatcctgcgccgcaccagccccggccagatcagcaccctgcgcgtgaacatcaccgcccccctgagccagcgctaccgcgtccgcatccgctacgccagcaccaccaacctgcagttccacaccagcatcgacggccgccccatcaaccagggcaacttcagcgccaccatgagcagcggcagcaacctgcagagcggcagcttccgcaccgtgggcttcaccacccccttcaacttcagcaacggcagcagcgtgttcaccctgagcgcccacgtgttcaacagcggcaacgaggtgtacatcgaccgcatcgagttcgtgcccgccgaggtgaccttcgaggccgagtacgacctggagagggctcagaaggccgtgaacgagctgttcaccagcagcaaccagatcggcctgaagaccgacgtgaccgactaccacatcgaccaggtgagcaacctggtggagtgcttaagcgacgagttctgcctggacgagaagaaggagctgagcgagaaggtgaagcacgccaagcgcctgagcgacgagcgcaacctgctgcaggaccccaacttccgcggcatcaaccgccagctggaccgcggctggcgaggcagcaccgatatcaccatccagggcggcgacgacgtgttcaaggagaactacgtgaccctgctgggcaccttcgacgagtgctaccccacctacctgtaccagaagatcgacgagagcaagctgaaggcctacacccgctaccagctgcgcggctacatcgaggacagccaggacctggaaatctacctgatccgctacaacgcgaagcacgagaccgtgaacgtgcccggcaccggcagcctgtggcccctgagcgcccccagccccatcggcaagtgcactagtcaccacagccaccacttcagcctggacatcgacgtgggctgcaccgacctgaacgaggacctgggcgtgtgggtgatcttcaagatcaagacccaggacggccacgcccgcctgggcaatctagagttcctggaggagaagcccctggtgggcgaggccctggcccgcgtgaagcgtgctgagaagaagtggcgcgacaagcgcgagaagctggagtgggagaccaacatcgtgtacaaggaggccaaggagagcgtggacgccctgttcgtgaacagccagtacgaccgcctgcaggccgacaccaacatcgccatgatccacgccgccgacaagcgcgtgcacagcattcgcgaggcctacctgcccgagctgagcgtgatccccggtgtgaacgccgccatcttcgaggaactcgagggccgcatctaggagctctatgatcgttcaaacatttggcaataaagtttcttaagattgaatcctgttgccggtcttgcgatgattatcatataatttctgttgaattacgttaagcatgtaataattaacatgtaatgcatgacgttatttatgagatgggtttttatgattagagtcccgcaattatacatttaatacgcgatagaaaacaaaatatagcgcgcaaactaggataaattatcgcgcgcggtgtcatctatgttactagatcaatagactacggaccgcgatcgcttaattaagcttgcatgcctgcagtgcagcgtgacccggtcgtgcccctctctagagataatgagcattgcatgtctaagttataaaaaattaccacatattttttttgtcacacttgtttgaagtgcagtttatctatctttatacatatatttaaactttactctacgaataatataatctatagtactacaataatatcagtgttttagagaatcatataaatgaacagttagacatggtctaaaggacaattgagtattttgacaacaggactctacagttttatctttttagtgtgcatgtgttctcctttttttttgcaaatagcttcacctatataatacttcatccattttattagtacatccatttagggtttagggttaatggtttttatagactaatttttttagtacatctattttattctattttagcctctaaattaagaaaactaaaactctattttagtttttttatttaataatttagatataaaatagaataaaataaagtgactaaaaattaaacaaataccctttaagaaattaaaaaaactaaggaaacatttttcttgtttcgagtagataatgccagcctgttaaacgccgccgacgagtctaacggacaccaaccagcgaaccagcagcgtcgcgtcgggccaagcgaagcagacggcacggcatctctgtcgctgcctctggacccctctcgagagttccgctccaccgttggacttgctccgctgtcggcatccagaaattgcgtggcggagcggcagacgtgagccggcacggcaggcggcctcctcctcctctcacggcaccggcagctacgggggattcctttcccaccgctccttcgctttcccttcctcgcccgccgtaataaatagacaccccctccacaccctctttccccaacctcgtgttgttcggagcgcacacacacacaaccagatctcccccaaatccacccgtcggcacctccgcttcaaggtacgccgctcgtcctccccccccccccctctctaccttctctagatcggcgttccggtccatagttagggcccggtagttctacttctgttcatgtttgtgttagatccgtgtttgtgttagatccgtgctgttagcgttcgtacacggatgcgacctgtacgtcagacacgttctgattgctaacttgccagtgtttctctttggggaatcctgggatggctctagccgttccgcagacgggatcgatttcatgattttttttgtttcgttgcatagggtttggtttgcccttttcctttatttcaatatatgccgtgcacttgtttgtcgggtcatcttttcatgcttttttttgtcttggttgtgatgatgtggtctggttgggcggtcgttctagatcggagtagaattctgtttcaaactacctggtggatttattaattttggatctgtatgtgtgtgccatacatattcatagttacgaattgaagatgatggatggaaatatcgatctaggataggtatacatgttgatgcgggttttactgatgcatatacagagatgctttttgttcgcttggttgtgatgatgtggtgtggttgggcggtcgttcattcgttctagatcggagtagaatactgtttcaaactacctggtgtatttattaattttggaactgtatgtgtgtgtcatacatcttcatagttacgagtttaagatggatggaaatatcgatctaggataggtatacatgttgatgtgggttttactgatgcatatacatgatggcatatgcagcatctattcatatgctctaaccttgagtacctatctattataataaacaagtatgttttataattattttgatcttgatatacttggatgatggcatatgcagcagctatatgtggatttttttagccctgccttcatacgctatttatttgcttggtactgtttcttttgtcgatgctcaccctgttgtttggtgttacttctgcagggatctccgatcatgcaaaaactcattaactcagtgcaaaactatgcctggggcagcaaaacggcgttgactgaactttatggtatggaaaatccgtccagccagccgatggccgagctgtggatgggcgcacatccgaaaagcagttcacgagtgcagaatgccgccggagatatcgtttcactgcgtgatgtgattgagagtgataaatcgactctgctcggagaggccgttgccaaacgctttggcgaactgcctttcctgttcaaagtattatgcgcagcacagccactctccattcaggttcatccaaacaaacacaattctgaaatcggttttgccaaagaaaatgccgcaggtatcccgatggatgccgccgagcgtaactataaagatcctaaccacaagccggagctggtttttgcgctgacgcctttccttgcgatgaacgcgtttcgtgaattttccgagattgtctccctactccagccggtcgcaggtgcacatccggcgattgctcactttttacaacagcctgatgccgaacgtttaagcgaactgttcgccagcctgttgaatatgcagggtgaagaaaaatcccgcgcgctggcgattttaaaatcggccctcgatagccagcagggtgaaccgtggcaaacgattcgtttaatttctgaattttacccggaagacagcggtctgttctccccgctattgctgaatgtggtgaaattgaaccctggcgaagcgatgttcctgttcgctgaaacaccgcacgcttacctgcaaggcgtggcgctggaagtgatggcaaactccgataacgtgctgcgtgcgggtctgacgcctaaatacattgatattccggaactggttgccaatgtgaaattcgaagccaaaccggctaaccagttgttgacccagccggtgaaacaaggtgcagaactggacttcccgattccagtggatgattttgccttctcgctgcatgaccttagtgataaagaaaccaccattagccagcagagtgccgccattttgttctgcgtcgaaggcgatgcaacgttgtggaaaggttctcagcagttacagcttaaaccgggtgaatcagcgtttattgccgccaacgaatcaccggtgactgtcaaaggccacggccgtttagcgcgtgtttacaacaagctgtaagagcttactgaaaaaattaacatctcttgctaagctgggtcatgggtcgtttaagctgccgatgtgcctgcgtcgtctggtgccctctctccatatggaggttgtcaaagtatctgctgttcgtgtcatgagtcgtgtcagtgttggtttaataatggaccggttgtgttgtgtgtgcgtactacccagaactatgacaaatcatgaataagtttgatgtttgaaattaaagcctgtgctcattatgttctgtctttcagttgtctcctaatatttgcctccaggtactggctatctaccgtttcttacttaggaggtgtttgaatgcactaaaactaatagttagtggctaaaattagttaaaacatccaaacaccatagctaatagttgaactattagctatttttggaaaattagttaatagtgaggtagttatttgttagctagctaattcaactaacaatttttagccaactaacaattagtttcagtgcattcaaacacccccttaatgttaacgtggttctatctaccgtctcctaatatatggttgattgttcggtttgttgctatgctattgggttctgattgctgctagttcttgctgaatccagaagttctcgtagtatagctcagattcatattatttatttgagtgataagtgatccaggttattactatgttagctaggttttttttacaaggataaattatctgtgatcataattcttatgaaagctttatgtttcctggaggcagtggcatgcaatgcatgacagcaacttgatcacaccagctgaggtagatacggtaacaaggttcttaaatctgttcaccaaatcattggagaacacacatacacattcttgccagtcttggttagagaaatttcatgacaaaatgccaaagctgtcttgactcttcacttttggccatgagtcgtgacttagtttggtttaatggaccggttctcctagcttgttctactcaaaactgttgttgatgcgaataagttgtgatggttgatctctggattttgttttgctctcaatagtggacgagattagatagcctgcaggcccgggggcgcgccctaattagctaacggccaggatcgccgcgtgagcctttagcaactagctagattaattaacgcaatctgttattaagttgtctaagcgtcaatttgtttacaccacaatatatcctgccaccagccagccaacagctccccgaccggcagctcggcacaaaatcaccactcgatacaggcagcccatcagaattaattctcatgtttgacagcttatcatcgactgcacggtgcaccaatgcttctggcgtcaggcagccatcggaagctgtggtatggctgtgcaggtcgtaaatcactgcataattcgtgtcgctcaaggcgcactcccgttctggataatgttttttgcgccgacatcataacggttctggcaaatattctgaaatgagctgttgacaattaatcatccggctcgtataatgtgtggaattgtgagcggataacaatttcacacaggaaacagaccatgagggaagcgttgatcgccgaagtatcgactcaactatcagaggtagttggcgtcatcgagcgccatctcgaaccgacgttgctggccgtacatttgtacggctccgcagtggatggcggcctgaagccacacagtgatattgatttgctggttacggtgaccgtaaggcttgatgaaacaacgcggcgagctttgatcaacgaccttttggaaacttcggcttcccctggagagagcgagattctccgcgctgtagaagtcaccattgttgtgcacgacgacatcattccgtggcgttatccagctaagcgcgaactgcaatttggagaatggcagcgcaatgacattcttgcaggtatcttcgagccagccacgatcgacattgatctggctatcttgctgacaaaagcaagagaacatagcgttgccttggtaggtccagcggcggaggaactctttgatccggttcctgaacaggatctatttgaggcgctaaatgaaaccttaacgctatggaactcgccgcccgactgggctggcgatgagcgaaatgtagtgcttacgttgtcccgcatttggtacagcgcagtaaccggcaaaatcgcgccgaaggatgtcgctgccgactgggcaatggagcgcctgccggcccagtatcagcccgtcatacttgaagctaggcaggcttatcttggacaagaagatcgcttggcctcgcgcgcagatcagttggaagaatttgttcactacgtgaaaggcgagatcaccaaagtagtcggcaaataaagctctagtggatctccgtacccagggatctggctcgcggcggacgcacgacgccggggcgagaccataggcgatctcctaaatcaatagtagctgtaacctcgaagcgtttcacttgtaacaacgattgagaatttttgtcataaaattgaaatacttggttcgcatttttgtcatccgcggtcagccgcaattctgacgaactgcccatttagctggagatgattgtacatccttcacgtgaaaatttctcaagcgctgtgaacaagggttcagattttagattgaaaggtgagccgttgaaacacgttcttcttgtcgatgacgacgtcgctatgcggcatcttattattgaataccttacgatccacgccttcaaagtgaccgcggtagccgacagcacccagttcacaagagtactctcttccgcgacggtcgatgtcgtggttgttgatctagatttaggtcgtgaagatgggctcgagatcgttcgtaatctggcggcaaagtctgatattccaatcataattatcagtggcgaccgccttgaggagacggataaagttgttgcactcgagctaggagcaagtgattttatcgctaagccgttcagtatcagagagtttctagcacgcattcgggttgccttgcgcgtgcgccccaacgttgtccgctccaaagaccgacggtctttttgttttactgactggacacttaatctcaggcaacgtcgcttgatgtccgaagctggcggtgaggtgaaacttacggcaggtgagttcaatcttctcctcgcgtttttagagaaaccccgcgacgttctatcgcgcgagcaacttctcattgccagtcgagtacgcgacgaggaggtttatgacaggagtatagatgttctcattttgaggctgcgccgcaaacttgaggcagatccgtcaagccctcaactgataaaaacagcaagaggtgccggttatttctttgacgcggacgtgcaggtttcgcacggggggacgatggcagcctgagccaattcccagatccccgaggaatcggcgtgagcggtcgcaaaccatccggcccggtacaaatcggcgcggcgctgggtgatgacctggtggagaagttgaaggccgcgcaggccgcccagcggcaacgcatcgaggcagaagcacgccccggtgaatcgtggcaagcggccgctgatcgaatccgcaaagaatcccggcaaccgccggcagccggtgcgccgtcgattaggaagccgcccaagggcgacgagcaaccagattttttcgttccgatgctctatgacgtgggcacccgcgatagtcgcagcatcatggacgtggccgttttccgtctgtcgaagcgtgaccgacgagctggcgaggtgatccgctacgagcttccagacgggcacgtagaggtttccgcagggccggccggcatggccagtgtgtgggattacgacctggtactgatggcggtttcccatctaaccgaatccatgaaccgataccgggaagggaagggagacaagcccggccgcgtgttccgtccacacgttgcggacgtactcaagttctgccggcgagccgatggcggaaagcagaaagacgacctggtagaaacctgcattcggttaaacaccacgcacgttgccatgcagcgtacgaagaaggccaagaacggccgcctggtgacggtatccgagggtgaagccttgattagccgctacaagatcgtaaagagcgaaaccgggcggccggagtacatcgagatcgagctggctgattggatgtaccgcgagatcacagaaggcaagaacccggacgtgctgacggttcaccccgattactttttgatcgatcccggcatcggccgttttctctaccgcctggcacgccgcgccgcaggcaaggcagaagccagatggttgttcaagacgatctacgaacgcagtggcagcgccggagagttcaagaagttctgtttcaccgtgcgcaagctgatcgggtcaaatgacctgccggagtacgatttgaaggaggaggcggggcaggctggcccgatcctagtcatgcgctaccgcaacctgatcgagggcgaagcatccgccggttcctaatgtacggagcagatgctagggcaaattgccctagcaggggaaaaaggtcgaaaaggtctctttcctgtggatagcacgtacattgggaacccaaagccgtacattgggaaccggaacccgtacattgggaacccaaagccgtacattgggaaccggtcacacatgtaagtgactgatataaaagagaaaaaaggcgatttttccgcctaaaactctttaaaacttattaaaactcttaaaacccgcctggcctgtgcataactgtctggccagcgcacagccgaagagctgcaaaaagcgcctacccttcggtcgctgcgctccctacgccccgccgcttcgcgtcggcctatcgcggccgctggccgctcaaaaatggctggcctacggccaggcaatctaccagggcgcggacaagccgcgccgtcgccactcgaccgccggcgctgaggtctgcctcgtgaagaaggtgttgctgactcataccaggcctgaatcgccccatcatccagccagaaagtgagggagccacggttgatgagagctttgttgtaggtggaccagttggtgattttgaacttttgctttgccacggaacggtctgcgttgtcgggaagatgcgtgatctgatccttcaactcagcaaaagttcgatttattcaacaaagccgccgtcccgtcaagtcagcgtaatgctctgccagtgttacaaccaattaaccaattctgattagaaaaactcatcgagcatcaaatgaaactgcaatttattcatatcaggattatcaataccatatttttgaaaaagccgtttctgtaatgaaggagaaaactcaccgaggcagttccataggatggcaagatcctggtatcggtctgcgattccgactcgtccaacatcaatacaacctattaatttcccctcgtcaaaaataaggttatcaagtgagaaatcaccatgagtgacgactgaatccggtgagaatggcaaaagctctgcattaatgaatcggccaacgcgcggggagaggcggtttgcgtattgggcgctcttccgcttcctcgctcactgactcgctgcgctcggtcgttcggctgcggcgagcggtatcagctcactcaaaggcggtaatacggttatccacagaatcaggggataacgcaggaaagaacatgtgagcaaaaggccagcaaaaggccaggaaccgtaaaaaggccgcgttgctggcgtttttccataggctccgcccccctgacgagcatcacaaaaatcgacgctcaagtcagaggtggcgaaacccgacaggactataaagataccaggcgtttccccctggaagctccctcgtgcgctctcctgttccgaccctgccgcttaccggatacctgtccgcctttctcccttcgggaagcgtggcgctttctcatagctcacgctgtaggtatctcagttcggtgtaggtcgttcgctccaagctgggctgtgtgcacgaaccccccgttcagcccgaccgctgcgccttatccggtaactatcgtcttgagtccaacccggtaagacacgacttatcgccactggcagcagccactggtaacaggattagcagagcgaggtatgtaggcggtgctacagagttcttgaagtggtggcctaactacggctacactagaagaacagtatttggtatctgcgctctgctgaagccagttaccttcggaaaaagagttggtagctcttgatccggcaaacaaaccaccgctggtagcggtggtttttttgtttgcaagcagcagattacgcgcagaaaaaaaggatctcaagaagatcctttgatcttttctacggggtctgacgctcagtggaacgaaaactcacgttaagggattttggtcatgagattatcaaaaaggatcttcacctagatccttttgatccggaatta

SEQ ID NO: 57 - DNA, 15030 bp, Artificial Sequence
  24372 vector
attcctgtggttggcatgcacatacaaatggacgaacggataaaccttttcacgcccttttaaatatccgattattctaataaacgctcttttctcttaggtttacccgccaatatatcctgtcaaacactgatagtttaaactggcactagcctaacggtgttgactaactaggccgcttccctaattagctaacccgggggcgcgccgggaccctaattagctaaggtacctgcagtgcagcgtgacccggtcgtgcccctctctagagataatgagcattgcatgtctaagttataaaaaattaccacatattttttttgtcacacttgtttgaagtgcagtttatctatctttatacatatatttaaactttactctacgaataatataatctatagtactacaataatatcagtgttttagagaatcatataaatgaacagttagacatggtctaaaggacaattgagtattttgacaacaggactctacagttttatctttttagtgtgcatgtgttctcctttttttttgcaaatagcttcacctatataatacttcatccattttattagtacatccatttagggtttagggttaatggtttttatagactaatttttttagtacatctattttattctattttagcctctaaattaagaaaactaaaactctattttagtttttttatttaataatttagatataaaatagaataaaataaagtgactaaaaattaaacaaataccctttaagaaattaaaaaaactaaggaaacatttttcttgtttcgagtagataatgccagcctgttaaacgccgtcgacgagtctaacggacaccaaccagcgaaccagcagcgtcgcgtcgggccaagcgaagcagacggcacggcatctctgtcgctgcctctggacccctctcgagagttccgctccaccgttggacttgctccgctgtcggcatccagaaattgcgtggcggagcggcagacgtgagccggcacggcaggcggcctcctcctcctctcacggcaccggcagctacgggggattcctttcccaccgctccttcgctttcccttcctcgcccgccgtaataaatagacaccccctccacaccctctttccccaacctcgtgttgttcggagcgcacacacacacaaccagatctcccccaaatccacccgtcggcacctccgcttcctaggtacgccgctcgtcctccccccccccccctctctaccttctctagatcggcgttccggtccatagttagggcccggtagttctacttctgttcatgtttgtgttagatccgtgtttgtgttagatccgtgctgctagcgttcgtacacggatgcgacctgtacgtcagacacgttctgattgctaacttgccagtgtttctctttggggaatcctgggatggctctagccgttccgcagacgggatcgatttcatgattttttttgtttcgttgcatagggtttggtttgcccttttcctttatttcaatatatgccgtgcacttgtttgtcgggtcatcttttcatgcttttttttgtcttggttgtgatgatgtggtctggttgggcggtcgttctagatcggagtagaattctgtttcaaactacctggtggatttattaattttggatctgtatgtgtgtgccatacatattcatagttacgaattgaagatgatggatggaaatatcgatctaggataggtatacatgttgatgcgggttttactgatgcatatacagagatgctttttgttcgcttggttgtgatgatgtggtgtggttgggcggtcgttcattcgttctagatcggagtagaatactgtttcaaactacctggtgtatttattaattttggaactgtatgtgtgtgtcatacatcttcatagttacgagtttaagatggatggaaatatcgatctaggataggtatacatgttgatgtgggttttactgatgcatatacatgatggcatatgcagcatctattcatatgctctaaccttgagtacctatctattataataaacaagtatgttttataattattttgatcttgatatacttggatgatggcatatccagcagctatatgtggatttttttagccctgccttcatacgctatttatttgcttggtactgtttcttttgtcgatgctcaccctgttgtttggtgttacttctgcaggatcctctaagtagcagccatggacaacaaccccaacatcaacgagtgcatcccctacaactgcctgagcaaccccgaggtggaggtgctgggcggcgagcgcatcgagaccggctacacccccatcgacatcagcctgagcctgacccagttcctgctgagcgagttcgtgcccggcgccggcttcgtgctgggcctggtggacatcatctggggcatcttcggccccagccagtgggacgccttcctggtgcagatcgagcagttgataaaccaacgcatagaggaattcgcccgcaaccaggccatcagccgcctggagggcctgagcaacctgtaccaaatctacgccgagagcttccgcgagtgggaggccgaccccaccaaccccgccctgcgcgaggagatgcgcatccagttcaacgacatgaacagcgccctgaccaccgccatccccctgttcgccgtgcagaactaccaggtgcccctgctgagcgtgtacgtgcaggccgccaacctgcacctgagcgtgctgcgcgacgtcagcgtgttcggccagcgctggggcttcgacgccgccaccatcaacagccgctacaacgacctgacccgcctgatcggcaactacaccgaccacgccgtgcgctggtacaacaccggcctggagcgcgtgtgggggcccgacagccgcgactggatcaggtacaaccagttccgccgcgagctgaccctgaccgtgctggacatcgtgagcctgttccccaactacgacagccgcacctaccccatccgcaccgtgagccagctgacccgcgagatttacaccaaccccgtgctggagaacttcgacggcagcttccgcggcagcgcccagggcatcgagggcagcatccgcagcccccacctgatggacatcctgaacagcatcaccatctacaccgacgcccaccgcggcgagtactactggagcggccaccagatcatggccagccccgtcggcttcagcggccccgagttcaccttccccctgtacggcacgatgggcaacgctgcacctcagcagcgcatcgtggcacagctgggccagggagtgtaccgcaccctgagcagcaccctgtaccgtcgacctttcaacatcggcatcaacaaccagcagctgagcgtgctggacggcaccgagttcgcctacggcaccagcagcaacctgcccagcgccgtgtaccgcaagagcggcaccgtggacagcctggacgagatcccccctcagaacaacaacgtgccacctcgacagggcttcagccaccgtctgagccacgtgagcatgttccgcagtggcttcagcaacagcagcgtgagcatcatccgtgcacctatgttcagctggattcaccgcagtgccgagttcaacaacatcatccccagcagccagatcacccagatccccctgaccaagagcaccaacctgggcagcggcaccagcgtggtgaagggccccggcttcaccggcggcgacatcctgcgccgcaccagccccggccagatcagcaccctgcgcgtgaacatcaccgcccccctgagccagcgctaccgcgtccgcatccgctacgccagcaccaccaacctgcagttccacaccagcatcgacggccgccccatcaaccagggcaacttcagcgccaccatgagcagcggcagcaacctgcagagcggcagcttccgcaccgtgggcttcaccacccccttcaacttcagcaacggcagcagcgtgttcaccctgagcgcccacgtgttcaacagcggcaacgaggtgtacatcgaccgcatcgagttcgtgcccgccgaggtgaccttcgaggccgagtacgacctggagagggctcagaaggccgtgaacgagctgttcaccagcagcaaccagatcggcctgaagaccgacgtgaccgactaccacatcgaccaggtgagcaacctggtggagtgcttaagcgacgagttctgcctggacgagaagaaggagctgagcgagaaggtgaagcacgccaagcgcctgagcgacgagcgcaacctgctgcaggaccccaacttccgcggcatcaaccgccagctggaccgcggctggcgaggcagcaccgatatcaccatccagggcggcgacgacgtgttcaaggagaactacgtgaccctgctgggcaccttcgacgagtgctaccccacctacctgtaccagaagatcgacgagagcaagctgaaggcctacacccgctaccagctgcgcggctacatcgaggacagccaggacctggaaatctacctgatccgctacaacgcgaagcacgagaccgtgaacgtgcccggcaccggcagcctgtggcccctgagcgcccccagccccatcggcaagtgcactagcgctcacgacagcctggcagagctcccttcactccaaacattgcgcatctctagtcaccacagccaccacttcagcctggacatcgacgtgggctgcaccgacctgaacgaggacctgggcgtgtgggtgatcttcaagatcaagacccaggacggccacgcccgcctgggcaatctagagttcctggaggagaagcccctggtgggcgaggccctggcccgcgtgaagcgtgctgagaagaagtggcgcgacaagcgcgagaagctggagtgggagaccaacatcgtgtacaaggaggccaaggagagcgtggacgccctgttcgtgaacagccagtacgaccgcctgcaggccgacaccaacatcgccatgatccacgccgccgacaagcgcgtgcacagcattcgcgaggcctacctgcccgagctgagcgtgatccccggtgtgaacgccgccatcttcgaggaactcgagggccgcatctaggagctctatgatcgttcaaacatttggcaataaagtttcttaagattgaatcctgttgccggtcttgcgatgattatcatataatttctgttgaattacgttaagcatgtaataattaacatgtaatgcatgacgttatttatgagatgggtttttatgattagagtcccgcaattatacatttaatacgcgatagaaaacaaaatatagcgcgcaaactaggataaattatcgcgcgcggtgtcatctatgttactagatcaatagactacggaccgcgatcgcttaattaagcttgcatgcctgcagtgcagcgtgacccggtcgtgcccctctctagagataatgagcattgcatgtctaagttataaaaaattaccacatattttttttgtcacacttgtttgaagtgcagtttatctatctttatacatatatttaaactttactctacgaataatataatctatagtactacaataatatcagtgttttagagaatcatataaatgaacagttagacatggtctaaaggacaattgagtattttgacaacaggactctacagttttatctttttagtgtgcatgtgttctcctttttttttgcaaatagcttcacctatataatacttcatccattttattagtacatccatttagggtttagggttaatggtttttatagactaatttttttagtacatctattttattctattttagcctctaaattaagaaaactaaaactctattttagtttttttatttaataatttagatataaaatagaataaaataaagtgactaaaaattaaacaaataccctttaagaaattaaaaaaactaaggaaacatttttcttgtttcgagtagataatgccagcctgttaaacgccgccgacgagtctaacggacaccaaccagcgaaccagcagcgtcgcgtcgggccaagcgaagcagacggcacggcatctctgtcgctgcctctggacccctctcgagagttccgctccaccgttggacttgctccgctgtcggcatccagaaattgcgtggcggagcggcagacgtgagccggcacggcaggcggcctcctcctcctctcacggcaccggcagctacgggggattcctttcccaccgctccttcgctttcccttcctcgcccgccgtaataaatagacaccccctccacaccctctttccccaacctcgtgttgttcggagcgcacacacacacaaccagatctcccccaaatccacccgtcggcacctccgcttcaaggtacgccgctcgtcctccccccccccccctctctaccttctctagatcggcgttccggtccatagttagggcccggtagttctacttctgttcatgtttgtgttagatccgtgtttgtgttagatccgtgctgttagcgttcgtacacggatgcgacctgtacgtcagacacgttctgattgctaacttgccagtgtttctctttggggaatcctgggatggctctagccgttccgcagacgggatcgatttcatgattttttttgtttcgttgcatagggtttggtttgcccttttcctttatttcaatatatgccgtgcacttgtttgtcgggtcatcttttcatgcttttttttgtcttggttgtgatgatgtggtctggttgggcggtcgttctagatcggagtagaattctgtttcaaactacctggtggatttattaattttggatctgtatgtgtgtgccatacatattcatagttacgaattgaagatgatggatggaaatatcgatctaggataggtatacatgttgatgcgggttttactgatgcatatacagagatgctttttgttcgcttggttgtgatgatgtggtgtggttgggcggtcgttcattcgttctagatcggagtagaatactgtttcaaactacctggtgtatttattaattttggaactgtatgtgtgtgtcatacatcttcatagttacgagtttaagatggatggaaatatcgatctaggataggtatacatgttgatgtgggttttactgatgcatatacatgatggcatatgcagcatctattcatatgctctaaccttgagtacctatctattataataaacaagtatgttttataattattttgatcttgatatacttggatgatggcatatgcagcagctatatgtggatttttttagccctgccttcatacgctatttatttgcttggtactgtttcttttgtcgatgctcaccctgttgtttggtgttacttctgcagggatctccgatcatgcaaaaactcattaactcagtgcaaaactatgcctggggcagcaaaacggcgttgactgaactttatggtatggaaaatccgtccagccagccgatggccgagctgtggatgggcgcacatccgaaaagcagttcacgagtgcagaatgccgccggagatatcgtttcactgcgtgatgtgattgagagtgataaatcgactctgctcggagaggccgttgccaaacgctttggcgaactgcctttcctgttcaaagtattatgcgcagcacagccactctccattcaggttcatccaaacaaacacaattctgaaatcggttttgccaaagaaaatgccgcaggtatcccgatggatgccgccgagcgtaactataaagatcctaaccacaagccggagctggtttttgcgctgacgcctttccttgcgatgaacgcgtttcgtgaattttccgagattgtctccctactccagccggtcgcaggtgcacatccggcgattgctcactttttacaacagcctgatgccgaacgtttaagcgaactgttcgccagcctgttgaatatgcagggtgaagaaaaatcccgcgcgctggcgattttaaaatcggccctcgatagccagcagggtgaaccgtggcaaacgattcgtttaatttctgaattttacccggaagacagcggtctgttctccccgctattgctgaatgtggtgaaattgaaccctggcgaagcgatgttcctgttcgctgaaacaccgcacgcttacctgcaaggcgtggcgctggaagtgatggcaaactccgataacgtgctgcgtgcgggtctgacgcctaaatacattgatattccggaactggttgccaatgtgaaattcgaagccaaaccggctaaccagttgttgacccagccggtgaaacaaggtgcagaactggacttcccgattccagtggatgattttgccttctcgctgcatgaccttagtgataaagaaaccaccattagccagcagagtgccgccattttgttctgcgtcgaaggcgatgcaacgttgtggaaaggttctcagcagttacagcttaaaccgggtgaatcagcgtttattgccgccaacgaatcaccggtgactgtcaaaggccacggccgtttagcgcgtgtttacaacaagctgtaagagcttactgaaaaaattaacatctcttgctaagctgggtcatgggtcgtttaagctgccgatgtgcctgcgtcgtctggtgccctctctccatatggaggttgtcaaagtatctgctgttcgtgtcatgagtcgtgtcagtgttggtttaataatggaccggttgtgttgtgtgtgcgtactacccagaactatgacaaatcatgaataagtttgatgtttgaaattaaagcctgtgctcattatgttctgtctttcagttgtctcctaatatttgcctccaggtactggctatctaccgtttcttacttaggaggtgtttgaatgcactaaaactaatagttagtggctaaaattagttaaaacatccaaacaccatagctaatagttgaactattagctatttttggaaaattagttaatagtgaggtagttatttgttagctagctaattcaactaacaatttttagccaactaacaattagtttcagtgcattcaaacacccccttaatgttaacgtggttctatctaccgtctcctaatatatggttgattgttcggtttgttgctatgctattgggttctgattgctgctagttcttgctgaatccagaagttctcgtagtatagctcagattcatattatttatttgagtgataagtgatccaggttattactatgttagctaggttttttttacaaggataaattatctgtgatcataattcttatgaaagctttatgtttcctggaggcagtggcatgcaatgcatgacagcaacttgatcacaccagctgaggtagatacggtaacaaggttcttaaatctgttcaccaaatcattggagaacacacatacacattcttgccagtcttggttagagaaatttcatgacaaaatgccaaagctgtcttgactcttcacttttggccatgagtcgtgacttagtttggtttaatggaccggttctcctagcttgttctactcaaaactgttgttgatgcgaataagttgtgatggttgatctctggattttgttttgctctcaatagtggacgagattagatagcctgcaggcccgggggcgcgccctaattagctaacggccaggatcgccgcgtgagcctttagcaactagctagattaattaacgcaatctgttattaagttgtctaagcgtcaatttgtttacaccacaatatatcctgccaccagccagccaacagctccccgaccggcagctcggcacaaaatcaccactcgatacaggcagcccatcagaattaattctcatgtttgacagcttatcatcgactgcacggtgcaccaatgcttctggcgtcaggcagccatcggaagctgtggtatggctgtgcaggtcgtaaatcactgcataattcgtgtcgctcaaggcgcactcccgttctggataatgttttttgcgccgacatcataacggttctggcaaatattctgaaatgagctgttgacaattaatcatccggctcgtataatgtgtggaattgtgagcggataacaatttcacacaggaaacagaccatgagggaagcgttgatcgccgaagtatcgactcaactatcagaggtagttggcgtcatcgagcgccatctcgaaccgacgttgctggccgtacatttgtacggctccgcagtggatggcggcctgaagccacacagtgatattgatttgctggttacggtgaccgtaaggcttgatgaaacaacgcggcgagctttgatcaacgaccttttggaaacttcggcttcccctggagagagcgagattctccgcgctgtagaagtcaccattgttgtgcacgacgacatcattccgtggcgttatccagctaagcgcgaactgcaatttggagaatggcagcgcaatgacattcttgcaggtatcttcgagccagccacgatcgacattgatctggctatcttgctgacaaaagcaagagaacatagcgttgccttggtaggtccagcggcggaggaactctttgatccggttcctgaacaggatctatttgaggcgctaaatgaaaccttaacgctatggaactcgccgcccgactgggctggcgatgagcgaaatgtagtgcttacgttgtcccgcatttggtacagcgcagtaaccggcaaaatcgcgccgaaggatgtcgctgccgactgggcaatggagcgcctgccggcccagtatcagcccgtcatacttgaagctaggcaggcttatcttggacaagaagatcgcttggcctcgcgcgcagatcagttggaagaatttgttcactacgtgaaaggcgagatcaccaaagtagtcggcaaataaagctctagtggatctccgtacccagggatctggctcgcggcggacgcacgacgccggggcgagaccataggcgatctcctaaatcaatagtagctgtaacctcgaagcgtttcacttgtaacaacgattgagaatttttgtcataaaattgaaatacttggttcgcatttttgtcatccgcggtcagccgcaattctgacgaactgcccatttagctggagatgattgtacatccttcacgtgaaaatttctcaagcgctgtgaacaagggttcagattttagattgaaaggtgagccgttgaaacacgttcttcttgtcgatgacgacgtcgctatgcggcatcttattattgaataccttacgatccacgccttcaaagtgaccgcggtagccgacagcacccagttcacaagagtactctcttccgcgacggtcgatgtcgtggttgttgatctagatttaggtcgtgaagatgggctcgagatcgttcgtaatctggcggcaaagtctgatattccaatcataattatcagtggcgaccgccttgaggagacggataaagttgttgcactcgagctaggagcaagtgattttatcgctaagccgttcagtatcagagagtttctagcacgcattcgggttgccttgcgcgtgcgccccaacgttgtccgctccaaagaccgacggtctttttgttttactgactggacacttaatctcaggcaacgtcgcttgatgtccgaagctggcggtgaggtgaaacttacggcaggtgagttcaatcttctcctcgcgtttttagagaaaccccgcgacgttctatcgcgcgagcaacttctcattgccagtcgagtacgcgacgaggaggtttatgacaggagtatagatgttctcattttgaggctgcgccgcaaacttgaggcagatccgtcaagccctcaactgataaaaacagcaagaggtgccggttatttctttgacgcggacgtgcaggtttcgcacggggggacgatggcagcctgagccaattcccagatccccgaggaatcggcgtgagcggtcgcaaaccatccggcccggtacaaatcggcgcggcgctgggtgatgacctggtggagaagttgaaggccgcgcaggccgcccagcggcaacgcatcgaggcagaagcacgccccggtgaatcgtggcaagcggccgctgatcgaatccgcaaagaatcccggcaaccgccggcagccggtgcgccgtcgattaggaagccgcccaagggcgacgagcaaccagattttttcgttccgatgctctatgacgtgggcacccgcgatagtcgcagcatcatggacgtggccgttttccgtctgtcgaagcgtgaccgacgagctggcgaggtgatccgctacgagcttccagacgggcacgtagaggtttccgcagggccggccggcatggccagtgtgtgggattacgacctggtactgatggcggtttcccatctaaccgaatccatgaaccgataccgggaagggaagggagacaagcccggccgcgtgttccgtccacacgttgcggacgtactcaagttctgccggcgagccgatggcggaaagcagaaagacgacctggtagaaacctgcattcggttaaacaccacgcacgttgccatgcagcgtacgaagaaggccaagaacggccgcctggtgacggtatccgagggtgaagccttgattagccgctacaagatcgtaaagagcgaaaccgggcggccggagtacatcgagatcgagctggctgattggatgtaccgcgagatcacagaaggcaagaacccggacgtgctgacggttcaccccgattactttttgatcgatcccggcatcggccgttttctctaccgcctggcacgccgcgccgcaggcaaggcagaagccagatggttgttcaagacgatctacgaacgcagtggcagcgccggagagttcaagaagttctgtttcaccgtgcgcaagctgatcgggtcaaatgacctgccggagtacgatttgaaggaggaggcggggcaggctggcccgatcctagtcatgcgctaccgcaacctgatcgagggcgaagcatccgccggttcctaatgtacggagcagatgctagggcaaattgccctagcaggggaaaaaggtcgaaaaggtctctttcctgtggatagcacgtacattgggaacccaaagccgtacattgggaaccggaacccgtacattgggaacccaaagccgtacattgggaaccggtcacacatgtaagtgactgatataaaagagaaaaaaggcgatttttccgcctaaaactctttaaaacttattaaaactcttaaaacccgcctggcctgtgcataactgtctggccagcgcacagccgaagagctgcaaaaagcgcctacccttcggtcgctgcgctccctacgccccgccgcttcgcgtcggcctatcgcggccgctggccgctcaaaaatggctggcctacggccaggcaatctaccagggcgcggacaagccgcgccgtcgccactcgaccgccggcgctgaggtctgcctcgtgaagaaggtgttgctgactcataccaggcctgaatcgccccatcatccagccagaaagtgagggagccacggttgatgagagctttgttgtaggtggaccagttggtgattttgaacttttgctttgccacggaacggtctgcgttgtcgggaagatgcgtgatctgatccttcaactcagcaaaagttcgatttattcaacaaagccgccgtcccgtcaagtcagcgtaatgctctgccagtgttacaaccaattaaccaattctgattagaaaaactcatcgagcatcaaatgaaactgcaatttattcatatcaggattatcaataccatatttttgaaaaagccgtttctgtaatgaaggagaaaactcaccgaggcagttccataggatggcaagatcctggtatcggtctgcgattccgactcgtccaacatcaatacaacctattaatttcccctcgtcaaaaataaggttatcaagtgagaaatcaccatgagtgacgactgaatccggtgagaatggcaaaagctctgcattaatgaatcggccaacgcgcggggagaggcggtttgcgtattgggcgctcttccgcttcctcgctcactgactcgctgcgctcggtcgttcggctgcggcgagcggtatcagctcactcaaaggcggtaatacggttatccacagaatcaggggataacgcaggaaagaacatgtgagcaaaaggccagcaaaaggccaggaaccgtaaaaaggccgcgttgctggcgtttttccataggctccgcccccctgacgagcatcacaaaaatcgacgctcaagtcagaggtggcgaaacccgacaggactataaagataccaggcgtttccccctggaagctccctcgtgcgctctcctgttccgaccctgccgcttaccggatacctgtccgcctttctcccttcgggaagcgtggcgctttctcatagctcacgctgtaggtatctcagttcggtgtaggtcgttcgctccaagctgggctgtgtgcacgaaccccccgttcagcccgaccgctgcgccttatccggtaactatcgtcttgagtccaacccggtaagacacgacttatcgccactggcagcagccactggtaacaggattagcagagcgaggtatgtaggcggtgctacagagttcttgaagtggtggcctaactacggctacactagaagaacagtatttggtatctgcgctctgctgaagccagttaccttcggaaaaagagttggtagctcttgatccggcaaacaaaccaccgctggtagcggtggtttttttgtttgcaagcagcagattacgcgcagaaaaaaaggatctcaagaagatcctttgatcttttctacggggtctgacgctcagtggaacgaaaactcacgttaagggattttggtcatgagattatcaaaaaggatcttcacctagatccttttgatccggaatta

SEQ ID NO: 58 - DNA, 15030 bp, Artificial Sequence
  24378 vector
attcctgtggttggcatgcacatacaaatggacgaacggataaaccttttcacgcccttttaaatatccgattattctaataaacgctcttttctcttaggtttacccgccaatatatcctgtcaaacactgatagtttaaactggcactagcctaacggtgttgactaactaggccgcttccctaattagctaacccgggggcgcgccgggaccctaattagctaaggtacctgcagtgcagcgtgacccggtcgtgcccctctctagagataatgagcattgcatgtctaagttataaaaaattaccacatattttttttgtcacacttgtttgaagtgcagtttatctatctttatacatatatttaaactttactctacgaataatataatctatagtactacaataatatcagtgttttagagaatcatataaatgaacagttagacatggtctaaaggacaattgagtattttgacaacaggactctacagttttatctttttagtgtgcatgtgttctcctttttttttgcaaatagcttcacctatataatacttcatccattttattagtacatccatttagggtttagggttaatggtttttatagactaatttttttagtacatctattttattctattttagcctctaaattaagaaaactaaaactctattttagtttttttatttaataatttagatataaaatagaataaaataaagtgactaaaaattaaacaaataccctttaagaaattaaaaaaactaaggaaacatttttcttgtttcgagtagataatgccagcctgttaaacgccgtcgacgagtctaacggacaccaaccagcgaaccagcagcgtcgcgtcgggccaagcgaagcagacggcacggcatctctgtcgctgcctctggacccctctcgagagttccgctccaccgttggacttgctccgctgtcggcatccagaaattgcgtggcggagcggcagacgtgagccggcacggcaggcggcctcctcctcctctcacggcaccggcagctacgggggattcctttcccaccgctccttcgctttcccttcctcgcccgccgtaataaatagacaccccctccacaccctctttccccaacctcgtgttgttcggagcgcacacacacacaaccagatctcccccaaatccacccgtcggcacctccgcttcctagcgctcacgacagcctggcagagctcccttcactccaaacattgcgcatctctaggtacgccgctcgtcctccccccccccccctctctaccttctctagatcggcgttccggtccatagttagggcccggtagttctacttctgttcatgtttgtgttagatccgtgtttgtgttagatccgtgctgctagcgttcgtacacggatgcgacctgtacgtcagacacgttctgattgctaacttgccagtgtttctctttggggaatcctgggatggctctagccgttccgcagacgggatcgatttcatgattttttttgtttcgttgcatagggtttggtttgcccttttcctttatttcaatatatgccgtgcacttgtttgtcgggtcatcttttcatgcttttttttgtcttggttgtgatgatgtggtctggttgggcggtcgttctagatcggagtagaattctgtttcaaactacctggtggatttattaattttggatctgtatgtgtgtgccatacatattcatagttacgaattgaagatgatggatggaaatatcgatctaggataggtatacatgttgatgcgggttttactgatgcatatacagagatgctttttgttcgcttggttgtgatgatgtggtgtggttgggcggtcgttcattcgttctagatcggagtagaatactgtttcaaactacctggtgtatttattaattttggaactgtatgtgtgtgtcatacatcttcatagttacgagtttaagatggatggaaatatcgatctaggataggtatacatgttgatgtgggttttactgatgcatatacatgatggcatatgcagcatctattcatatgctctaaccttgagtacctatctattataataaacaagtatgttttataattattttgatcttgatatacttggatgatggcatatccagcagctatatgtggatttttttagccctgccttcatacgctatttatttgcttggtactgtttcttttgtcgatgctcaccctgttgtttggtgttacttctgcaggatcctctaagtagcagccatggacaacaaccccaacatcaacgagtgcatcccctacaactgcctgagcaaccccgaggtggaggtgctgggcggcgagcgcatcgagaccggctacacccccatcgacatcagcctgagcctgacccagttcctgctgagcgagttcgtgcccggcgccggcttcgtgctgggcctggtggacatcatctggggcatcttcggccccagccagtgggacgccttcctggtgcagatcgagcagttgataaaccaacgcatagaggaattcgcccgcaaccaggccatcagccgcctggagggcctgagcaacctgtaccaaatctacgccgagagcttccgcgagtgggaggccgaccccaccaaccccgccctgcgcgaggagatgcgcatccagttcaacgacatgaacagcgccctgaccaccgccatccccctgttcgccgtgcagaactaccaggtgcccctgctgagcgtgtacgtgcaggccgccaacctgcacctgagcgtgctgcgcgacgtcagcgtgttcggccagcgctggggcttcgacgccgccaccatcaacagccgctacaacgacctgacccgcctgatcggcaactacaccgaccacgccgtgcgctggtacaacaccggcctggagcgcgtgtgggggcccgacagccgcgactggatcaggtacaaccagttccgccgcgagctgaccctgaccgtgctggacatcgtgagcctgttccccaactacgacagccgcacctaccccatccgcaccgtgagccagctgacccgcgagatttacaccaaccccgtgctggagaacttcgacggcagcttccgcggcagcgcccagggcatcgagggcagcatccgcagcccccacctgatggacatcctgaacagcatcaccatctacaccgacgcccaccgcggcgagtactactggagcggccaccagatcatggccagccccgtcggcttcagcggccccgagttcaccttccccctgtacggcacgatgggcaacgctgcacctcagcagcgcatcgtggcacagctgggccagggagtgtaccgcaccctgagcagcaccctgtaccgtcgacctttcaacatcggcatcaacaaccagcagctgagcgtgctggacggcaccgagttcgcctacggcaccagcagcaacctgcccagcgccgtgtaccgcaagagcggcaccgtggacagcctggacgagatcccccctcagaacaacaacgtgccacctcgacagggcttcagccaccgtctgagccacgtgagcatgttccgcagtggcttcagcaacagcagcgtgagcatcatccgtgcacctatgttcagctggattcaccgcagtgccgagttcaacaacatcatccccagcagccagatcacccagatccccctgaccaagagcaccaacctgggcagcggcaccagcgtggtgaagggccccggcttcaccggcggcgacatcctgcgccgcaccagccccggccagatcagcaccctgcgcgtgaacatcaccgcccccctgagccagcgctaccgcgtccgcatccgctacgccagcaccaccaacctgcagttccacaccagcatcgacggccgccccatcaaccagggcaacttcagcgccaccatgagcagcggcagcaacctgcagagcggcagcttccgcaccgtgggcttcaccacccccttcaacttcagcaacggcagcagcgtgttcaccctgagcgcccacgtgttcaacagcggcaacgaggtgtacatcgaccgcatcgagttcgtgcccgccgaggtgaccttcgaggccgagtacgacctggagagggctcagaaggccgtgaacgagctgttcaccagcagcaaccagatcggcctgaagaccgacgtgaccgactaccacatcgaccaggtgagcaacctggtggagtgcttaagcgacgagttctgcctggacgagaagaaggagctgagcgagaaggtgaagcacgccaagcgcctgagcgacgagcgcaacctgctgcaggaccccaacttccgcggcatcaaccgccagctggaccgcggctggcgaggcagcaccgatatcaccatccagggcggcgacgacgtgttcaaggagaactacgtgaccctgctgggcaccttcgacgagtgctaccccacctacctgtaccagaagatcgacgagagcaagctgaaggcctacacccgctaccagctgcgcggctacatcgaggacagccaggacctggaaatctacctgatccgctacaacgcgaagcacgagaccgtgaacgtgcccggcaccggcagcctgtggcccctgagcgcccccagccccatcggcaagtgcactagtcaccacagccaccacttcagcctggacatcgacgtgggctgcaccgacctgaacgaggacctgggcgtgtgggtgatcttcaagatcaagacccaggacggccacgcccgcctgggcaatctagagttcctggaggagaagcccctggtgggcgaggccctggcccgcgtgaagcgtgctgagaagaagtggcgcgacaagcgcgagaagctggagtgggagaccaacatcgtgtacaaggaggccaaggagagcgtggacgccctgttcgtgaacagccagtacgaccgcctgcaggccgacaccaacatcgccatgatccacgccgccgacaagcgcgtgcacagcattcgcgaggcctacctgcccgagctgagcgtgatccccggtgtgaacgccgccatcttcgaggaactcgagggccgcatctaggagctctatgatcgttcaaacatttggcaataaagtttcttaagattgaatcctgttgccggtcttgcgatgattatcatataatttctgttgaattacgttaagcatgtaataattaacatgtaatgcatgacgttatttatgagatgggtttttatgattagagtcccgcaattatacatttaatacgcgatagaaaacaaaatatagcgcgcaaactaggataaattatcgcgcgcggtgtcatctatgttactagatcaatagactacggaccgcgatcgcttaattaagcttgcatgcctgcagtgcagcgtgacccggtcgtgcccctctctagagataatgagcattgcatgtctaagttataaaaaattaccacatattttttttgtcacacttgtttgaagtgcagtttatctatctttatacatatatttaaactttactctacgaataatataatctatagtactacaataatatcagtgttttagagaatcatataaatgaacagttagacatggtctaaaggacaattgagtattttgacaacaggactctacagttttatctttttagtgtgcatgtgttctcctttttttttgcaaatagcttcacctatataatacttcatccattttattagtacatccatttagggtttagggttaatggtttttatagactaatttttttagtacatctattttattctattttagcctctaaattaagaaaactaaaactctattttagtttttttatttaataatttagatataaaatagaataaaataaagtgactaaaaattaaacaaataccctttaagaaattaaaaaaactaaggaaacatttttcttgtttcgagtagataatgccagcctgttaaacgccgccgacgagtctaacggacaccaaccagcgaaccagcagcgtcgcgtcgggccaagcgaagcagacggcacggcatctctgtcgctgcctctggacccctctcgagagttccgctccaccgttggacttgctccgctgtcggcatccagaaattgcgtggcggagcggcagacgtgagccggcacggcaggcggcctcctcctcctctcacggcaccggcagctacgggggattcctttcccaccgctccttcgctttcccttcctcgcccgccgtaataaatagacaccccctccacaccctctttccccaacctcgtgttgttcggagcgcacacacacacaaccagatctcccccaaatccacccgtcggcacctccgcttcaaggtacgccgctcgtcctccccccccccccctctctaccttctctagatcggcgttccggtccatagttagggcccggtagttctacttctgttcatgtttgtgttagatccgtgtttgtgttagatccgtgctgttagcgttcgtacacggatgcgacctgtacgtcagacacgttctgattgctaacttgccagtgtttctctttggggaatcctgggatggctctagccgttccgcagacgggatcgatttcatgattttttttgtttcgttgcatagggtttggtttgcccttttcctttatttcaatatatgccgtgcacttgtttgtcgggtcatcttttcatgcttttttttgtcttggttgtgatgatgtggtctggttgggcggtcgttctagatcggagtagaattctgtttcaaactacctggtggatttattaattttggatctgtatgtgtgtgccatacatattcatagttacgaattgaagatgatggatggaaatatcgatctaggataggtatacatgttgatgcgggttttactgatgcatatacagagatgctttttgttcgcttggttgtgatgatgtggtgtggttgggcggtcgttcattcgttctagatcggagtagaatactgtttcaaactacctggtgtatttattaattttggaactgtatgtgtgtgtcatacatcttcatagttacgagtttaagatggatggaaatatcgatctaggataggtatacatgttgatgtgggttttactgatgcatatacatgatggcatatgcagcatctattcatatgctctaaccttgagtacctatctattataataaacaagtatgttttataattattttgatcttgatatacttggatgatggcatatgcagcagctatatgtggatttttttagccctgccttcatacgctatttatttgcttggtactgtttcttttgtcgatgctcaccctgttgtttggtgttacttctgcagggatctccgatcatgcaaaaactcattaactcagtgcaaaactatgcctggggcagcaaaacggcgttgactgaactttatggtatggaaaatccgtccagccagccgatggccgagctgtggatgggcgcacatccgaaaagcagttcacgagtgcagaatgccgccggagatatcgtttcactgcgtgatgtgattgagagtgataaatcgactctgctcggagaggccgttgccaaacgctttggcgaactgcctttcctgttcaaagtattatgcgcagcacagccactctccattcaggttcatccaaacaaacacaattctgaaatcggttttgccaaagaaaatgccgcaggtatcccgatggatgccgccgagcgtaactataaagatcctaaccacaagccggagctggtttttgcgctgacgcctttccttgcgatgaacgcgtttcgtgaattttccgagattgtctccctactccagccggtcgcaggtgcacatccggcgattgctcactttttacaacagcctgatgccgaacgtttaagcgaactgttcgccagcctgttgaatatgcagggtgaagaaaaatcccgcgcgctggcgattttaaaatcggccctcgatagccagcagggtgaaccgtggcaaacgattcgtttaatttctgaattttacccggaagacagcggtctgttctccccgctattgctgaatgtggtgaaattgaaccctggcgaagcgatgttcctgttcgctgaaacaccgcacgcttacctgcaaggcgtggcgctggaagtgatggcaaactccgataacgtgctgcgtgcgggtctgacgcctaaatacattgatattccggaactggttgccaatgtgaaattcgaagccaaaccggctaaccagttgttgacccagccggtgaaacaaggtgcagaactggacttcccgattccagtggatgattttgccttctcgctgcatgaccttagtgataaagaaaccaccattagccagcagagtgccgccattttgttctgcgtcgaaggcgatgcaacgttgtggaaaggttctcagcagttacagcttaaaccgggtgaatcagcgtttattgccgccaacgaatcaccggtgactgtcaaaggccacggccgtttagcgcgtgtttacaacaagctgtaagagcttactgaaaaaattaacatctcttgctaagctgggtcatgggtcgtttaagctgccgatgtgcctgcgtcgtctggtgccctctctccatatggaggttgtcaaagtatctgctgttcgtgtcatgagtcgtgtcagtgttggtttaataatggaccggttgtgttgtgtgtgcgtactacccagaactatgacaaatcatgaataagtttgatgtttgaaattaaagcctgtgctcattatgttctgtctttcagttgtctcctaatatttgcctccaggtactggctatctaccgtttcttacttaggaggtgtttgaatgcactaaaactaatagttagtggctaaaattagttaaaacatccaaacaccatagctaatagttgaactattagctatttttggaaaattagttaatagtgaggtagttatttgttagctagctaattcaactaacaatttttagccaactaacaattagtttcagtgcattcaaacacccccttaatgttaacgtggttctatctaccgtctcctaatatatggttgattgttcggtttgttgctatgctattgggttctgattgctgctagttcttgctgaatccagaagttctcgtagtatagctcagattcatattatttatttgagtgataagtgatccaggttattactatgttagctaggttttttttacaaggataaattatctgtgatcataattcttatgaaagctttatgtttcctggaggcagtggcatgcaatgcatgacagcaacttgatcacaccagctgaggtagatacggtaacaaggttcttaaatctgttcaccaaatcattggagaacacacatacacattcttgccagtcttggttagagaaatttcatgacaaaatgccaaagctgtcttgactcttcacttttggccatgagtcgtgacttagtttggtttaatggaccggttctcctagcttgttctactcaaaactgttgttgatgcgaataagttgtgatggttgatctctggattttgttttgctctcaatagtggacgagattagatagcctgcaggcccgggggcgcgccctaattagctaacggccaggatcgccgcgtgagcctttagcaactagctagattaattaacgcaatctgttattaagttgtctaagcgtcaatttgtttacaccacaatatatcctgccaccagccagccaacagctccccgaccggcagctcggcacaaaatcaccactcgatacaggcagcccatcagaattaattctcatgtttgacagcttatcatcgactgcacggtgcaccaatgcttctggcgtcaggcagccatcggaagctgtggtatggctgtgcaggtcgtaaatcactgcataattcgtgtcgctcaaggcgcactcccgttctggataatgttttttgcgccgacatcataacggttctggcaaatattctgaaatgagctgttgacaattaatcatccggctcgtataatgtgtggaattgtgagcggataacaatttcacacaggaaacagaccatgagggaagcgttgatcgccgaagtatcgactcaactatcagaggtagttggcgtcatcgagcgccatctcgaaccgacgttgctggccgtacatttgtacggctccgcagtggatggcggcctgaagccacacagtgatattgatttgctggttacggtgaccgtaaggcttgatgaaacaacgcggcgagctttgatcaacgaccttttggaaacttcggcttcccctggagagagcgagattctccgcgctgtagaagtcaccattgttgtgcacgacgacatcattccgtggcgttatccagctaagcgcgaactgcaatttggagaatggcagcgcaatgacattcttgcaggtatcttcgagccagccacgatcgacattgatctggctatcttgctgacaaaagcaagagaacatagcgttgccttggtaggtccagcggcggaggaactctttgatccggttcctgaacaggatctatttgaggcgctaaatgaaaccttaacgctatggaactcgccgcccgactgggctggcgatgagcgaaatgtagtgcttacgttgtcccgcatttggtacagcgcagtaaccggcaaaatcgcgccgaaggatgtcgctgccgactgggcaatggagcgcctgccggcccagtatcagcccgtcatacttgaagctaggcaggcttatcttggacaagaagatcgcttggcctcgcgcgcagatcagttggaagaatttgttcactacgtgaaaggcgagatcaccaaagtagtcggcaaataaagctctagtggatctccgtacccagggatctggctcgcggcggacgcacgacgccggggcgagaccataggcgatctcctaaatcaatagtagctgtaacctcgaagcgtttcacttgtaacaacgattgagaatttttgtcataaaattgaaatacttggttcgcatttttgtcatccgcggtcagccgcaattctgacgaactgcccatttagctggagatgattgtacatccttcacgtgaaaatttctcaagcgctgtgaacaagggttcagattttagattgaaaggtgagccgttgaaacacgttcttcttgtcgatgacgacgtcgctatgcggcatcttattattgaataccttacgatccacgccttcaaagtgaccgcggtagccgacagcacccagttcacaagagtactctcttccgcgacggtcgatgtcgtggttgttgatctagatttaggtcgtgaagatgggctcgagatcgttcgtaatctggcggcaaagtctgatattccaatcataattatcagtggcgaccgccttgaggagacggataaagttgttgcactcgagctaggagcaagtgattttatcgctaagccgttcagtatcagagagtttctagcacgcattcgggttgccttgcgcgtgcgccccaacgttgtccgctccaaagaccgacggtctttttgttttactgactggacacttaatctcaggcaacgtcgcttgatgtccgaagctggcggtgaggtgaaacttacggcaggtgagttcaatcttctcctcgcgtttttagagaaaccccgcgacgttctatcgcgcgagcaacttctcattgccagtcgagtacgcgacgaggaggtttatgacaggagtatagatgttctcattttgaggctgcgccgcaaacttgaggcagatccgtcaagccctcaactgataaaaacagcaagaggtgccggttatttctttgacgcggacgtgcaggtttcgcacggggggacgatggcagcctgagccaattcccagatccccgaggaatcggcgtgagcggtcgcaaaccatccggcccggtacaaatcggcgcggcgctgggtgatgacctggtggagaagttgaaggccgcgcaggccgcccagcggcaacgcatcgaggcagaagcacgccccggtgaatcgtggcaagcggccgctgatcgaatccgcaaagaatcccggcaaccgccggcagccggtgcgccgtcgattaggaagccgcccaagggcgacgagcaaccagattttttcgttccgatgctctatgacgtgggcacccgcgatagtcgcagcatcatggacgtggccgttttccgtctgtcgaagcgtgaccgacgagctggcgaggtgatccgctacgagcttccagacgggcacgtagaggtttccgcagggccggccggcatggccagtgtgtgggattacgacctggtactgatggcggtttcccatctaaccgaatccatgaaccgataccgggaagggaagggagacaagcccggccgcgtgttccgtccacacgttgcggacgtactcaagttctgccggcgagccgatggcggaaagcagaaagacgacctggtagaaacctgcattcggttaaacaccacgcacgttgccatgcagcgtacgaagaaggccaagaacggccgcctggtgacggtatccgagggtgaagccttgattagccgctacaagatcgtaaagagcgaaaccgggcggccggagtacatcgagatcgagctggctgattggatgtaccgcgagatcacagaaggcaagaacccggacgtgctgacggttcaccccgattactttttgatcgatcccggcatcggccgttttctctaccgcctggcacgccgcgccgcaggcaaggcagaagccagatggttgttcaagacgatctacgaacgcagtggcagcgccggagagttcaagaagttctgtttcaccgtgcgcaagctgatcgggtcaaatgacctgccggagtacgatttgaaggaggaggcggggcaggctggcccgatcctagtcatgcgctaccgcaacctgatcgagggcgaagcatccgccggttcctaatgtacggagcagatgctagggcaaattgccctagcaggggaaaaaggtcgaaaaggtctctttcctgtggatagcacgtacattgggaacccaaagccgtacattgggaaccggaacccgtacattgggaacccaaagccgtacattgggaaccggtcacacatgtaagtgactgatataaaagagaaaaaaggcgatttttccgcctaaaactctttaaaacttattaaaactcttaaaacccgcctggcctgtgcataactgtctggccagcgcacagccgaagagctgcaaaaagcgcctacccttcggtcgctgcgctccctacgccccgccgcttcgcgtcggcctatcgcggccgctggccgctcaaaaatggctggcctacggccaggcaatctaccagggcgcggacaagccgcgccgtcgccactcgaccgccggcgctgaggtctgcctcgtgaagaaggtgttgctgactcataccaggcctgaatcgccccatcatccagccagaaagtgagggagccacggttgatgagagctttgttgtaggtggaccagttggtgattttgaacttttgctttgccacggaacggtctgcgttgtcgggaagatgcgtgatctgatccttcaactcagcaaaagttcgatttattcaacaaagccgccgtcccgtcaagtcagcgtaatgctctgccagtgttacaaccaattaaccaattctgattagaaaaactcatcgagcatcaaatgaaactgcaatttattcatatcaggattatcaataccatatttttgaaaaagccgtttctgtaatgaaggagaaaactcaccgaggcagttccataggatggcaagatcctggtatcggtctgcgattccgactcgtccaacatcaatacaacctattaatttcccctcgtcaaaaataaggttatcaagtgagaaatcaccatgagtgacgactgaatccggtgagaatggcaaaagctctgcattaatgaatcggccaacgcgcggggagaggcggtttgcgtattgggcgctcttccgcttcctcgctcactgactcgctgcgctcggtcgttcggctgcggcgagcggtatcagctcactcaaaggcggtaatacggttatccacagaatcaggggataacgcaggaaagaacatgtgagcaaaaggccagcaaaaggccaggaaccgtaaaaaggccgcgttgctggcgtttttccataggctccgcccccctgacgagcatcacaaaaatcgacgctcaagtcagaggtggcgaaacccgacaggactataaagataccaggcgtttccccctggaagctccctcgtgcgctctcctgttccgaccctgccgcttaccggatacctgtccgcctttctcccttcgggaagcgtggcgctttctcatagctcacgctgtaggtatctcagttcggtgtaggtcgttcgctccaagctgggctgtgtgcacgaaccccccgttcagcccgaccgctgcgccttatccggtaactatcgtcttgagtccaacccggtaagacacgacttatcgccactggcagcagccactggtaacaggattagcagagcgaggtatgtaggcggtgctacagagttcttgaagtggtggcctaactacggctacactagaagaacagtatttggtatctgcgctctgctgaagccagttaccttcggaaaaagagttggtagctcttgatccggcaaacaaaccaccgctggtagcggtggtttttttgtttgcaagcagcagattacgcgcagaaaaaaaggatctcaagaagatcctttgatcttttctacggggtctgacgctcagtggaacgaaaactcacgttaagggattttggtcatgagattatcaaaaaggatcttcacctagatccttttgatccggaatta

SEQ ID NO: 59 - DNA, 15033 bp, Artificial Sequence
  24382 vector
attcctgtggttggcatgcacatacaaatggacgaacggataaaccttttcacgcccttttaaatatccgattattctaataaacgctcttttctcttaggtttacccgccaatatatcctgtcaaacactgatagtttaaactggcactagcctaacggtgttgactaactaggccgcttccctaattagctaacccgggggcgcgccgggaccctaattagctaaggtacctgcagtgcagcgtgacccggtcgtgcccctctctagagataatgagcattgcatgtctaagttataaaaaattaccacatattttttttgtcacacttgtttgaagtgcagtttatctatctttatacatatatttaaactttactctacgaataatataatctatagtactacaataatatcagtgttttagagaatcatataaatgaacagttagacatggtctaaaggacaattgagtattttgacaacaggactctacagttttatctttttagtgtgcatgtgttctcctttttttttgcaaatagcttcacctatataatacttcatccattttattagtacatccatttagggtttagggttaatggtttttatagactaatttttttagtacatctattttattctattttagcctctaaattaagaaaactaaaactctattttagtttttttatttaataatttagatataaaatagaataaaataaagtgactaaaaattaaacaaataccctttaagaaattaaaaaaactaaggaaacatttttcttgtttcgagtagataatgccagcctgttaaacgccgtcgacgagtctaacggacaccaaccagcgaaccagcagcgtcgcgtcgggccaagcgaagcagacggcacggcatctctgtcgctgcctctggacccctctcgagagttccgctccaccgttggacttgctccgctgtcggcatccagaaattgcgtggcggagcggcagacgtgagccggcacggcaggcggcctcctcctcctctcacggcaccggcagctacgggggattcctttcccaccgctccttcgctttcccttcctcgcccgccgtaataaatagacaccccctccacaccctctttccccaacctcgtgttgttcggagcgcacacacacacaaccagatctcccccaaatccacccgtcggcacctccgcttcctagcgacgaccccaaaggacaggtttcccacagctttattgaacaattgtttgcatctaggtacgccgctcgtcctccccccccccccctctctaccttctctagatcggcgttccggtccatagttagggcccggtagttctacttctgttcatgtttgtgttagatccgtgtttgtgttagatccgtgctgctagcgttcgtacacggatgcgacctgtacgtcagacacgttctgattgctaacttgccagtgtttctctttggggaatcctgggatggctctagccgttccgcagacgggatcgatttcatgattttttttgtttcgttgcatagggtttggtttgcccttttcctttatttcaatatatgccgtgcacttgtttgtcgggtcatcttttcatgcttttttttgtcttggttgtgatgatgtggtctggttgggcggtcgttctagatcggagtagaattctgtttcaaactacctggtggatttattaattttggatctgtatgtgtgtgccatacatattcatagttacgaattgaagatgatggatggaaatatcgatctaggataggtatacatgttgatgcgggttttactgatgcatatacagagatgctttttgttcgcttggttgtgatgatgtggtgtggttgggcggtcgttcattcgttctagatcggagtagaatactgtttcaaactacctggtgtatttattaattttggaactgtatgtgtgtgtcatacatcttcatagttacgagtttaagatggatggaaatatcgatctaggataggtatacatgttgatgtgggttttactgatgcatatacatgatggcatatgcagcatctattcatatgctctaaccttgagtacctatctattataataaacaagtatgttttataattattttgatcttgatatacttggatgatggcatatccagcagctatatgtggatttttttagccctgccttcatacgctatttatttgcttggtactgtttcttttgtcgatgctcaccctgttgtttggtgttacttctgcaggatcctctaagtagcagccatggacaacaaccccaacatcaacgagtgcatcccctacaactgcctgagcaaccccgaggtggaggtgctgggcggcgagcgcatcgagaccggctacacccccatcgacatcagcctgagcctgacccagttcctgctgagcgagttcgtgcccggcgccggcttcgtgctgggcctggtggacatcatctggggcatcttcggccccagccagtgggacgccttcctggtgcagatcgagcagttgataaaccaacgcatagaggaattcgcccgcaaccaggccatcagccgcctggagggcctgagcaacctgtaccaaatctacgccgagagcttccgcgagtgggaggccgaccccaccaaccccgccctgcgcgaggagatgcgcatccagttcaacgacatgaacagcgccctgaccaccgccatccccctgttcgccgtgcagaactaccaggtgcccctgctgagcgtgtacgtgcaggccgccaacctgcacctgagcgtgctgcgcgacgtcagcgtgttcggccagcgctggggcttcgacgccgccaccatcaacagccgctacaacgacctgacccgcctgatcggcaactacaccgaccacgccgtgcgctggtacaacaccggcctggagcgcgtgtgggggcccgacagccgcgactggatcaggtacaaccagttccgccgcgagctgaccctgaccgtgctggacatcgtgagcctgttccccaactacgacagccgcacctaccccatccgcaccgtgagccagctgacccgcgagatttacaccaaccccgtgctggagaacttcgacggcagcttccgcggcagcgcccagggcatcgagggcagcatccgcagcccccacctgatggacatcctgaacagcatcaccatctacaccgacgcccaccgcggcgagtactactggagcggccaccagatcatggccagccccgtcggcttcagcggccccgagttcaccttccccctgtacggcacgatgggcaacgctgcacctcagcagcgcatcgtggcacagctgggccagggagtgtaccgcaccctgagcagcaccctgtaccgtcgacctttcaacatcggcatcaacaaccagcagctgagcgtgctggacggcaccgagttcgcctacggcaccagcagcaacctgcccagcgccgtgtaccgcaagagcggcaccgtggacagcctggacgagatcccccctcagaacaacaacgtgccacctcgacagggcttcagccaccgtctgagccacgtgagcatgttccgcagtggcttcagcaacagcagcgtgagcatcatccgtgcacctatgttcagctggattcaccgcagtgccgagttcaacaacatcatccccagcagccagatcacccagatccccctgaccaagagcaccaacctgggcagcggcaccagcgtggtgaagggccccggcttcaccggcggcgacatcctgcgccgcaccagccccggccagatcagcaccctgcgcgtgaacatcaccgcccccctgagccagcgctaccgcgtccgcatccgctacgccagcaccaccaacctgcagttccacaccagcatcgacggccgccccatcaaccagggcaacttcagcgccaccatgagcagcggcagcaacctgcagagcggcagcttccgcaccgtgggcttcaccacccccttcaacttcagcaacggcagcagcgtgttcaccctgagcgcccacgtgttcaacagcggcaacgaggtgtacatcgaccgcatcgagttcgtgcccgccgaggtgaccttcgaggccgagtacgacctggagagggctcagaaggccgtgaacgagctgttcaccagcagcaaccagatcggcctgaagaccgacgtgaccgactaccacatcgaccaggtgagcaacctggtggagtgcttaagcgacgagttctgcctggacgagaagaaggagctgagcgagaaggtgaagcacgccaagcgcctgagcgacgagcgcaacctgctgcaggaccccaacttccgcggcatcaaccgccagctggaccgcggctggcgaggcagcaccgatatcaccatccagggcggcgacgacgtgttcaaggagaactacgtgaccctgctgggcaccttcgacgagtgctaccccacctacctgtaccagaagatcgacgagagcaagctgaaggcctacacccgctaccagctgcgcggctacatcgaggacagccaggacctggaaatctacctgatccgctacaacgcgaagcacgagaccgtgaacgtgcccggcaccggcagcctgtggcccctgagcgcccccagccccatcggcaagtgcactagtcaccacagccaccacttcagcctggacatcgacgtgggctgcaccgacctgaacgaggacctgggcgtgtgggtgatcttcaagatcaagacccaggacggccacgcccgcctgggcaatctagagttcctggaggagaagcccctggtgggcgaggccctggcccgcgtgaagcgtgctgagaagaagtggcgcgacaagcgcgagaagctggagtgggagaccaacatcgtgtacaaggaggccaaggagagcgtggacgccctgttcgtgaacagccagtacgaccgcctgcaggccgacaccaacatcgccatgatccacgccgccgacaagcgcgtgcacagcattcgcgaggcctacctgcccgagctgagcgtgatccccggtgtgaacgccgccatcttcgaggaactcgagggccgcatctaggagctctatgatcgttcaaacatttggcaataaagtttcttaagattgaatcctgttgccggtcttgcgatgattatcatataatttctgttgaattacgttaagcatgtaataattaacatgtaatgcatgacgttatttatgagatgggtttttatgattagagtcccgcaattatacatttaatacgcgatagaaaacaaaatatagcgcgcaaactaggataaattatcgcgcgcggtgtcatctatgttactagatcaatagactacggaccgcgatcgcttaattaagcttgcatgcctgcagtgcagcgtgacccggtcgtgcccctctctagagataatgagcattgcatgtctaagttataaaaaattaccacatattttttttgtcacacttgtttgaagtgcagtttatctatctttatacatatatttaaactttactctacgaataatataatctatagtactacaataatatcagtgttttagagaatcatataaatgaacagttagacatggtctaaaggacaattgagtattttgacaacaggactctacagttttatctttttagtgtgcatgtgttctcctttttttttgcaaatagcttcacctatataatacttcatccattttattagtacatccatttagggtttagggttaatggtttttatagactaatttttttagtacatctattttattctattttagcctctaaattaagaaaactaaaactctattttagtttttttatttaataatttagatataaaatagaataaaataaagtgactaaaaattaaacaaataccctttaagaaattaaaaaaactaaggaaacatttttcttgtttcgagtagataatgccagcctgttaaacgccgccgacgagtctaacggacaccaaccagcgaaccagcagcgtcgcgtcgggccaagcgaagcagacggcacggcatctctgtcgctgcctctggacccctctcgagagttccgctccaccgttggacttgctccgctgtcggcatccagaaattgcgtggcggagcggcagacgtgagccggcacggcaggcggcctcctcctcctctcacggcaccggcagctacgggggattcctttcccaccgctccttcgctttcccttcctcgcccgccgtaataaatagacaccccctccacaccctctttccccaacctcgtgttgttcggagcgcacacacacacaaccagatctcccccaaatccacccgtcggcacctccgcttcaaggtacgccgctcgtcctccccccccccccctctctaccttctctagatcggcgttccggtccatagttagggcccggtagttctacttctgttcatgtttgtgttagatccgtgtttgtgttagatccgtgctgttagcgttcgtacacggatgcgacctgtacgtcagacacgttctgattgctaacttgccagtgtttctctttggggaatcctgggatggctctagccgttccgcagacgggatcgatttcatgattttttttgtttcgttgcatagggtttggtttgcccttttcctttatttcaatatatgccgtgcacttgtttgtcgggtcatcttttcatgcttttttttgtcttggttgtgatgatgtggtctggttgggcggtcgttctagatcggagtagaattctgtttcaaactacctggtggatttattaattttggatctgtatgtgtgtgccatacatattcatagttacgaattgaagatgatggatggaaatatcgatctaggataggtatacatgttgatgcgggttttactgatgcatatacagagatgctttttgttcgcttggttgtgatgatgtggtgtggttgggcggtcgttcattcgttctagatcggagtagaatactgtttcaaactacctggtgtatttattaattttggaactgtatgtgtgtgtcatacatcttcatagttacgagtttaagatggatggaaatatcgatctaggataggtatacatgttgatgtgggttttactgatgcatatacatgatggcatatgcagcatctattcatatgctctaaccttgagtacctatctattataataaacaagtatgttttataattattttgatcttgatatacttggatgatggcatatgcagcagctatatgtggatttttttagccctgccttcatacgctatttatttgcttggtactgtttcttttgtcgatgctcaccctgttgtttggtgttacttctgcagggatctccgatcatgcaaaaactcattaactcagtgcaaaactatgcctggggcagcaaaacggcgttgactgaactttatggtatggaaaatccgtccagccagccgatggccgagctgtggatgggcgcacatccgaaaagcagttcacgagtgcagaatgccgccggagatatcgtttcactgcgtgatgtgattgagagtgataaatcgactctgctcggagaggccgttgccaaacgctttggcgaactgcctttcctgttcaaagtattatgcgcagcacagccactctccattcaggttcatccaaacaaacacaattctgaaatcggttttgccaaagaaaatgccgcaggtatcccgatggatgccgccgagcgtaactataaagatcctaaccacaagccggagctggtttttgcgctgacgcctttccttgcgatgaacgcgtttcgtgaattttccgagattgtctccctactccagccggtcgcaggtgcacatccggcgattgctcactttttacaacagcctgatgccgaacgtttaagcgaactgttcgccagcctgttgaatatgcagggtgaagaaaaatcccgcgcgctggcgattttaaaatcggccctcgatagccagcagggtgaaccgtggcaaacgattcgtttaatttctgaattttacccggaagacagcggtctgttctccccgctattgctgaatgtggtgaaattgaaccctggcgaagcgatgttcctgttcgctgaaacaccgcacgcttacctgcaaggcgtggcgctggaagtgatggcaaactccgataacgtgctgcgtgcgggtctgacgcctaaatacattgatattccggaactggttgccaatgtgaaattcgaagccaaaccggctaaccagttgttgacccagccggtgaaacaaggtgcagaactggacttcccgattccagtggatgattttgccttctcgctgcatgaccttagtgataaagaaaccaccattagccagcagagtgccgccattttgttctgcgtcgaaggcgatgcaacgttgtggaaaggttctcagcagttacagcttaaaccgggtgaatcagcgtttattgccgccaacgaatcaccggtgactgtcaaaggccacggccgtttagcgcgtgtttacaacaagctgtaagagcttactgaaaaaattaacatctcttgctaagctgggtcatgggtcgtttaagctgccgatgtgcctgcgtcgtctggtgccctctctccatatggaggttgtcaaagtatctgctgttcgtgtcatgagtcgtgtcagtgttggtttaataatggaccggttgtgttgtgtgtgcgtactacccagaactatgacaaatcatgaataagtttgatgtttgaaattaaagcctgtgctcattatgttctgtctttcagttgtctcctaatatttgcctccaggtactggctatctaccgtttcttacttaggaggtgtttgaatgcactaaaactaatagttagtggctaaaattagttaaaacatccaaacaccatagctaatagttgaactattagctatttttggaaaattagttaatagtgaggtagttatttgttagctagctaattcaactaacaatttttagccaactaacaattagtttcagtgcattcaaacacccccttaatgttaacgtggttctatctaccgtctcctaatatatggttgattgttcggtttgttgctatgctattgggttctgattgctgctagttcttgctgaatccagaagttctcgtagtatagctcagattcatattatttatttgagtgataagtgatccaggttattactatgttagctaggttttttttacaaggataaattatctgtgatcataattcttatgaaagctttatgtttcctggaggcagtggcatgcaatgcatgacagcaacttgatcacaccagctgaggtagatacggtaacaaggttcttaaatctgttcaccaaatcattggagaacacacatacacattcttgccagtcttggttagagaaatttcatgacaaaatgccaaagctgtcttgactcttcacttttggccatgagtcgtgacttagtttggtttaatggaccggttctcctagcttgttctactcaaaactgttgttgatgcgaataagttgtgatggttgatctctggattttgttttgctctcaatagtggacgagattagatagcctgcaggcccgggggcgcgccctaattagctaacggccaggatcgccgcgtgagcctttagcaactagctagattaattaacgcaatctgttattaagttgtctaagcgtcaatttgtttacaccacaatatatcctgccaccagccagccaacagctccccgaccggcagctcggcacaaaatcaccactcgatacaggcagcccatcagaattaattctcatgtttgacagcttatcatcgactgcacggtgcaccaatgcttctggcgtcaggcagccatcggaagctgtggtatggctgtgcaggtcgtaaatcactgcataattcgtgtcgctcaaggcgcactcccgttctggataatgttttttgcgccgacatcataacggttctggcaaatattctgaaatgagctgttgacaattaatcatccggctcgtataatgtgtggaattgtgagcggataacaatttcacacaggaaacagaccatgagggaagcgttgatcgccgaagtatcgactcaactatcagaggtagttggcgtcatcgagcgccatctcgaaccgacgttgctggccgtacatttgtacggctccgcagtggatggcggcctgaagccacacagtgatattgatttgctggttacggtgaccgtaaggcttgatgaaacaacgcggcgagctttgatcaacgaccttttggaaacttcggcttcccctggagagagcgagattctccgcgctgtagaagtcaccattgttgtgcacgacgacatcattccgtggcgttatccagctaagcgcgaactgcaatttggagaatggcagcgcaatgacattcttgcaggtatcttcgagccagccacgatcgacattgatctggctatcttgctgacaaaagcaagagaacatagcgttgccttggtaggtccagcggcggaggaactctttgatccggttcctgaacaggatctatttgaggcgctaaatgaaaccttaacgctatggaactcgccgcccgactgggctggcgatgagcgaaatgtagtgcttacgttgtcccgcatttggtacagcgcagtaaccggcaaaatcgcgccgaaggatgtcgctgccgactgggcaatggagcgcctgccggcccagtatcagcccgtcatacttgaagctaggcaggcttatcttggacaagaagatcgcttggcctcgcgcgcagatcagttggaagaatttgttcactacgtgaaaggcgagatcaccaaagtagtcggcaaataaagctctagtggatctccgtacccagggatctggctcgcggcggacgcacgacgccggggcgagaccataggcgatctcctaaatcaatagtagctgtaacctcgaagcgtttcacttgtaacaacgattgagaatttttgtcataaaattgaaatacttggttcgcatttttgtcatccgcggtcagccgcaattctgacgaactgcccatttagctggagatgattgtacatccttcacgtgaaaatttctcaagcgctgtgaacaagggttcagattttagattgaaaggtgagccgttgaaacacgttcttcttgtcgatgacgacgtcgctatgcggcatcttattattgaataccttacgatccacgccttcaaagtgaccgcggtagccgacagcacccagttcacaagagtactctcttccgcgacggtcgatgtcgtggttgttgatctagatttaggtcgtgaagatgggctcgagatcgttcgtaatctggcggcaaagtctgatattccaatcataattatcagtggcgaccgccttgaggagacggataaagttgttgcactcgagctaggagcaagtgattttatcgctaagccgttcagtatcagagagtttctagcacgcattcgggttgccttgcgcgtgcgccccaacgttgtccgctccaaagaccgacggtctttttgttttactgactggacacttaatctcaggcaacgtcgcttgatgtccgaagctggcggtgaggtgaaacttacggcaggtgagttcaatcttctcctcgcgtttttagagaaaccccgcgacgttctatcgcgcgagcaacttctcattgccagtcgagtacgcgacgaggaggtttatgacaggagtatagatgttctcattttgaggctgcgccgcaaacttgaggcagatccgtcaagccctcaactgataaaaacagcaagaggtgccggttatttctttgacgcggacgtgcaggtttcgcacggggggacgatggcagcctgagccaattcccagatccccgaggaatcggcgtgagcggtcgcaaaccatccggcccggtacaaatcggcgcggcgctgggtgatgacctggtggagaagttgaaggccgcgcaggccgcccagcggcaacgcatcgaggcagaagcacgccccggtgaatcgtggcaagcggccgctgatcgaatccgcaaagaatcccggcaaccgccggcagccggtgcgccgtcgattaggaagccgcccaagggcgacgagcaaccagattttttcgttccgatgctctatgacgtgggcacccgcgatagtcgcagcatcatggacgtggccgttttccgtctgtcgaagcgtgaccgacgagctggcgaggtgatccgctacgagcttccagacgggcacgtagaggtttccgcagggccggccggcatggccagtgtgtgggattacgacctggtactgatggcggtttcccatctaaccgaatccatgaaccgataccgggaagggaagggagacaagcccggccgcgtgttccgtccacacgttgcggacgtactcaagttctgccggcgagccgatggcggaaagcagaaagacgacctggtagaaacctgcattcggttaaacaccacgcacgttgccatgcagcgtacgaagaaggccaagaacggccgcctggtgacggtatccgagggtgaagccttgattagccgctacaagatcgtaaagagcgaaaccgggcggccggagtacatcgagatcgagctggctgattggatgtaccgcgagatcacagaaggcaagaacccggacgtgctgacggttcaccccgattactttttgatcgatcccggcatcggccgttttctctaccgcctggcacgccgcgccgcaggcaaggcagaagccagatggttgttcaagacgatctacgaacgcagtggcagcgccggagagttcaagaagttctgtttcaccgtgcgcaagctgatcgggtcaaatgacctgccggagtacgatttgaaggaggaggcggggcaggctggcccgatcctagtcatgcgctaccgcaacctgatcgagggcgaagcatccgccggttcctaatgtacggagcagatgctagggcaaattgccctagcaggggaaaaaggtcgaaaaggtctctttcctgtggatagcacgtacattgggaacccaaagccgtacattgggaaccggaacccgtacattgggaacccaaagccgtacattgggaaccggtcacacatgtaagtgactgatataaaagagaaaaaaggcgatttttccgcctaaaactctttaaaacttattaaaactcttaaaacccgcctggcctgtgcataactgtctggccagcgcacagccgaagagctgcaaaaagcgcctacccttcggtcgctgcgctccctacgccccgccgcttcgcgtcggcctatcgcggccgctggccgctcaaaaatggctggcctacggccaggcaatctaccagggcgcggacaagccgcgccgtcgccactcgaccgccggcgctgaggtctgcctcgtgaagaaggtgttgctgactcataccaggcctgaatcgccccatcatccagccagaaagtgagggagccacggttgatgagagctttgttgtaggtggaccagttggtgattttgaacttttgctttgccacggaacggtctgcgttgtcgggaagatgcgtgatctgatccttcaactcagcaaaagttcgatttattcaacaaagccgccgtcccgtcaagtcagcgtaatgctctgccagtgttacaaccaattaaccaattctgattagaaaaactcatcgagcatcaaatgaaactgcaatttattcatatcaggattatcaataccatatttttgaaaaagccgtttctgtaatgaaggagaaaactcaccgaggcagttccataggatggcaagatcctggtatcggtctgcgattccgactcgtccaacatcaatacaacctattaatttcccctcgtcaaaaataaggttatcaagtgagaaatcaccatgagtgacgactgaatccggtgagaatggcaaaagctctgcattaatgaatcggccaacgcgcggggagaggcggtttgcgtattgggcgctcttccgcttcctcgctcactgactcgctgcgctcggtcgttcggctgcggcgagcggtatcagctcactcaaaggcggtaatacggttatccacagaatcaggggataacgcaggaaagaacatgtgagcaaaaggccagcaaaaggccaggaaccgtaaaaaggccgcgttgctggcgtttttccataggctccgcccccctgacgagcatcacaaaaatcgacgctcaagtcagaggtggcgaaacccgacaggactataaagataccaggcgtttccccctggaagctccctcgtgcgctctcctgttccgaccctgccgcttaccggatacctgtccgcctttctcccttcgggaagcgtggcgctttctcatagctcacgctgtaggtatctcagttcggtgtaggtcgttcgctccaagctgggctgtgtgcacgaaccccccgttcagcccgaccgctgcgccttatccggtaactatcgtcttgagtccaacccggtaagacacgacttatcgccactggcagcagccactggtaacaggattagcagagcgaggtatgtaggcggtgctacagagttcttgaagtggtggcctaactacggctacactagaagaacagtatttggtatctgcgctctgctgaagccagttaccttcggaaaaagagttggtagctcttgatccggcaaacaaaccaccgctggtagcggtggtttttttgtttgcaagcagcagattacgcgcagaaaaaaaggatctcaagaagatcctttgatcttttctacggggtctgacgctcagtggaacgaaaactcacgttaagggattttggtcatgagattatcaaaaaggatcttcacctagatccttttgatccggaatta

SEQ ID NO: 60 - protein, 940 aa, Artificial Sequence
  Mutant Cry1Ab
MDNNPNINECIPYNCLSNPEVEVLGGERIETGYTPIDISLSLTQFLLSEFVPGAGFVLGLVDIIWGIFGPSQWDAFLVQIEQLINQRIEEFARNQAISRLEGLSNLYQIYAESFREWEADPTNPALREEMRIQFNDMNSALTTAIPLFAVQNYQVPLLSVYVQAANLHLSVLRDVSVFGQRWGFDAATINSRYNDLTRLIGNYTDHAVRWYNTGLERVWGPDSRDWIRYNQFRRELTLTVLDIVSLFPNYDSRTYPIRTVSQLTREIYTNPVLENFDGSFRGSAQGIEGSIRSPHLMDILNSITIYTDAHRGEYYWSGHQIMASPVGFSGPEFTFPLYGTMGNAAPQQRIVAQLGQGVYRTLSSTLYRRPFNIGINNQQLSVLDGTEFAYGTSSNLPSAVYRKSGTVDSLDEIPPQNNNVPPRQGFSHRLSHVSMFRSGFSNSSVSIIRAPMFSWIHRSAEFNNIIPSSQITQIPLTKSTNLGSGTSVVKGPGFTGGDILRRTSPGQISTLRVNITAPLSQRYRVRIRYASTTNLQFHTSIDGRPINQGNFSATMSSGSNLQSGSFRTVGFTTPFNFSNGSSVFTLSAHVFNSGNEVYIDRIEFVPAEVTFEAEYDLERAQKAVNELFTSSNQIGLKTDVTDYHIDQVSNLVECLSDEFCLDEKKELSEKVKHAKRLSDERNLLQDPNFRGINRQLDRGWRGSTDITIQGGDDVFKENYVTLLGTFDECYPTYLYQKIDESKLKAYTRYQLRGYIEDSQDLEIYLIRYNAKHETVNVPGTGSLWPLSAPSPIGKCTSHHSHHFSLDIDVGCTDLNEDLGVWVIFKIKTQDGHARLGNLEFLEEKPLVGEALARVKRAEKKWRDKREKLEWETNIVYKEAKESVDALFVNSQYDRLQADTNIAMIHAADKRVHSIREAYLPELSVIPGVNAAIFEELEGRI

SEQ ID NO: 61 - protein, 959 aa, Artificial Sequence
  Mutant Cry1Ab
MDNNPNINECIPYNCLSNPEVEVLGGERIETGYTPIDISLSLTQFLLSEFVPGAGFVLGLVDIIWGIFGPSQWDAFLVQIEQLINQRIEEFARNQAISRLEGLSNLYQIYAESFREWEADPTNPALREEMRIQFNDMNSALTTAIPLFAVQNYQVPLLSVYVQAANLHLSVLRDVSVFGQRWGFDAATINSRYNDLTRLIGNYTDHAVRWYNTGLERVWGPDSRDWIRYNQFRRELTLTVLDIVSLFPNYDSRTYPIRTVSQLTREIYTNPVLENFDGSFRGSAQGIEGSIRSPHLMDILNSITIYTDAHRGEYYWSGHQIMASPVGFSGPEFTFPLYGTMGNAAPQQRIVAQLGQGVYRTLSSTLYRRPFNIGINNQQLSVLDGTEFAYGTSSNLPSAVYRKSGTVDSLDEIPPQNNNVPPRQGFSHRLSHVSMFRSGFSNSSVSIIRAPMFSWIHRSAEFNNIIPSSQITQIPLTKSTNLGSGTSVVKGPGFTGGDILRRTSPGQISTLRVNITAPLSQRYRVRIRYASTTNLQFHTSIDGRPINQGNFSATMSSGSNLQSGSFRTVGFTTPFNFSNGSSVFTLSAHVFNSGNEVYIDRIEFVPAEVTFEAEYDLERAQKAVNELFTSSNQIGLKTDVTDYHIDQVSNLVECLSDEFCLDEKKELSEKVKHAKRLSDERNLLQDPNFRGINRQLDRGWRGSTDITIQGGDDVFKENYVTLLGTFDECYPTYLYQKIDESKLKAYTRYQLRGYIEDSQDLEIYLIRYNAKHETVNVPGTGSLWPLSAPSPIGKCTSILFIDKKSTVHSNCKLVASHHSHHFSLDIDVGCTDLNEDLGVWVIFKIKTQDGHARLGNLEFLEEKPLVGEALARVKRAEKKWRDKREKLEWETNIVYKEAKESVDALFVNSQYDRLQADTNIAMIHAADKRVHSIREAYLPELSVIPGVNAAIFEELEGRI

SEQ ID NO: 62 - protein, 959 aa, Artificial Sequence
  Mutant Cry1Ab
MDNNPNINECIPYNCLSNPEVEVLGGERIETGYTPIDISLSLTQFLLSEFVPGAGFVLGLVDIIWGIFGPSQWDAFLVQIEQLINQRIEEFARNQAISRLEGLSNLYQIYAESFREWEADPTNPALREEMRIQFNDMNSALTTAIPLFAVQNYQVPLLSVYVQAANLHLSVLRDVSVFGQRWGFDAATINSRYNDLTRLIGNYTDHAVRWYNTGLERVWGPDSRDWIRYNQFRRELTLTVLDIVSLFPNYDSRTYPIRTVSQLTREIYTNPVLENFDGSFRGSAQGIEGSIRSPHLMDILNSITIYTDAHRGEYYWSGHQIMASPVGFSGPEFTFPLYGTMGNAAPQQRIVAQLGQGVYRTLSSTLYRRPFNIGINNQQLSVLDGTEFAYGTSSNLPSAVYRKSGTVDSLDEIPPQNNNVPPRQGFSHRLSHVSMFRSGFSNSSVSIIRAPMFSWIHRSAEFNNIIPSSQITQIPLTKSTNLGSGTSVVKGPGFTGGDILRRTSPGQISTLRVNITAPLSQRYRVRIRYASTTNLQFHTSIDGRPINQGNFSATMSSGSNLQSGSFRTVGFTTPFNFSNGSSVFTLSAHVFNSGNEVYIDRIEFVPAEVTFEAEYDLERAQKAVNELFTSSNQIGLKTDVTDYHIDQVSNLVECLSDEFCLDEKKELSEKVKHAKRLSDERNLLQDPNFRGINRQLDRGWRGSTDITIQGGDDVFKENYVTLLGTFDECYPTYLYQKIDESKLKAYTRYQLRGYIEDSQDLEIYLIRYNAKHETVNVPGTGSLWPLSAPSPIGKCTSTSNTHEMTDRAVSRPSLTSHHSHHFSLDIDVGCTDLNEDLGVWVIFKIKTQDGHARLGNLEFLEEKPLVGEALARVKRAEKKWRDKREKLEWETNIVYKEAKESVDALFVNSQYDRLQADTNIAMIHAADKRVHSIREAYLPELSVIPGVNAAIFEELEGRI

SEQ ID NO: 63 - protein, 958 aa, Artificial Sequence
  Mutant Cry1Ab
MDNNPNINECIPYNCLSNPEVEVLGGERIETGYTPIDISLSLTQFLLSEFVPGAGFVLGLVDIIWGIFGPSQWDAFLVQIEQLINQRIEEFARNQAISRLEGLSNLYQIYAESFREWEADPTNPALREEMRIQFNDMNSALTTAIPLFAVQNYQVPLLSVYVQAANLHLSVLRDVSVFGQRWGFDAATINSRYNDLTRLIGNYTDHAVRWYNTGLERVWGPDSRDWIRYNQFRRELTLTVLDIVSLFPNYDSRTYPIRTVSQLTREIYTNPVLENFDGSFRGSAQGIEGSIRSPHLMDILNSITIYTDAHRGEYYWSGHQIMASPVGFSGPEFTFPLYGTMGNAAPQQRIVAQLGQGVYRTLSSTLYRRPFNIGINNQQLSVLDGTEFAYGTSSNLPSAVYRKSGTVDSLDEIPPQNNNVPPRQGFSHRLSHVSMFRSGFSNSSVSIIRAPMFSWIHRSAEFNNIIPSSQITQIPLTKSTNLGSGTSVVKGPGFTGGDILRRTSPGQISTLRVNITAPLSQRYRVRIRYASTTNLQFHTSIDGRPINQGNFSATMSSGSNLQSGSFRTVGFTTPFNFSNGSSVFTLSAHVFNSGNEVYIDRIEFVPAEVTFEAEYDLERAQKAVNELFTSSNQIGLKTDVTDYHIDQVSNLVECLSDEFCLDEKKELSEKVKHAKRLSDERNLLQDPNFRGINRQLDRGWRGSTDITIQGGDDVFKENYVTLLGTFDECYPTYLYQKIDESKLKAYTRYQLRGYIEDSQDLEIYLIRYNAKHETVNVPGTGSLWPLSAPSPIGKCTSISVAFLIEPCQQLVGFTSHHSHHFSLDIDVGCTDLNEDLGVWVIFKIKTQDGHARLGNLEFLEEKPLVGEALARVKRAEKKWRDKREKLEWETNIVYKEAKESVDALFVNSQYDRLQADTNIAMIHAADKRVHSIREAYLPELSVIPGVNAAIFEELEGRI

SEQ ID NO: 64 - protein, 959 aa, Artificial Sequence
  Mutant Cry1Ab
MDNNPNINECIPYNCLSNPEVEVLGGERIETGYTPIDISLSLTQFLLSEFVPGAGFVLGLVDIIWGIFGPSQWDAFLVQIEQLINQRIEEFARNQAISRLEGLSNLYQIYAESFREWEADPTNPALREEMRIQFNDMNSALTTAIPLFAVQNYQVPLLSVYVQAANLHLSVLRDVSVFGQRWGFDAATINSRYNDLTRLIGNYTDHAVRWYNTGLERVWGPDSRDWIRYNQFRRELTLTVLDIVSLFPNYDSRTYPIRTVSQLTREIYTNPVLENFDGSFRGSAQGIEGSIRSPHLMDILNSITIYTDAHRGEYYWSGHQIMASPVGFSGPEFTFPLYGTMGNAAPQQRIVAQLGQGVYRTLSSTLYRRPFNIGINNQQLSVLDGTEFAYGTSSNLPSAVYRKSGTVDSLDEIPPQNNNVPPRQGFSHRLSHVSMFRSGFSNSSVSIIRAPMFSWIHRSAEFNNIIPSSQITQIPLTKSTNLGSGTSVVKGPGFTGGDILRRTSPGQISTLRVNITAPLSQRYRVRIRYASTTNLQFHTSIDGRPINQGNFSATMSSGSNLQSGSFRTVGFTTPFNFSNGSSVFTLSAHVFNSGNEVYIDRIEFVPAEVTFEAEYDLERAQKAVNELFTSSNQIGLKTDVTDYHIDQVSNLVECLSDEFCLDEKKELSEKVKHAKRLSDERNLLQDPNFRGINRQLDRGWRGSTDITIQGGDDVFKENYVTLLGTFDECYPTYLYQKIDESKLKAYTRYQLRGYIEDSQDLEIYLIRYNAKHETVNVPGTGSLWPLSAPSPIGKCTSDDPKGQVSHSFIEQLFASSHHSHHFSLDIDVGCTDLNEDLGVWVIFKIKTQDGHARLGNLEFLEEKPLVGEALARVKRAEKKWRDKREKLEWETNIVYKEAKESVDALFVNSQYDRLQADTNIAMIHAADKRVHSIREAYLPELSVIPGVNAAIFEELEGRI

SEQ ID NO: 65 - protein, 958 aa, Artificial Sequence
  Mutant Cry1Ab
MDNNPNINECIPYNCLSNPEVEVLGGERIETGYTPIDISLSLTQFLLSEFVPGAGFVLGLVDIIWGIFGPSQWDAFLVQIEQLINQRIEEFARNQAISRLEGLSNLYQIYAESFREWEADPTNPALREEMRIQFNDMNSALTTAIPLFAVQNYQVPLLSVYVQAANLHLSVLRDVSVFGQRWGFDAATINSRYNDLTRLIGNYTDHAVRWYNTGLERVWGPDSRDWIRYNQFRRELTLTVLDIVSLFPNYDSRTYPIRTVSQLTREIYTNPVLENFDGSFRGSAQGIEGSIRSPHLMDILNSITIYTDAHRGEYYWSGHQIMASPVGFSGPEFTFPLYGTMGNAAPQQRIVAQLGQGVYRTLSSTLYRRPFNIGINNQQLSVLDGTEFAYGTSSNLPSAVYRKSGTVDSLDEIPPQNNNVPPRQGFSHRLSHVSMFRSGFSNSSVSIIRAPMFSWIHRSAEFNNIIPSSQITQIPLTKSTNLGSGTSVVKGPGFTGGDILRRTSPGQISTLRVNITAPLSQRYRVRIRYASTTNLQFHTSIDGRPINQGNFSATMSSGSNLQSGSFRTVGFTTPFNFSNGSSVFTLSAHVFNSGNEVYIDRIEFVPAEVTFEAEYDLERAQKAVNELFTSSNQIGLKTDVTDYHIDQVSNLVECLSDEFCLDEKKELSEKVKHAKRLSDERNLLQDPNFRGINRQLDRGWRGSTDITIQGGDDVFKENYVTLLGTFDECYPTYLYQKIDESKLKAYTRYQLRGYIEDSQDLEIYLIRYNAKHETVNVPGTGSLWPLSAPSPIGKCTSPFSLFLSLCFIELLKVTSHHSHHFSLDIDVGCTDLNEDLGVWVIFKIKTQDGHARLGNLEFLEEKPLVGEALARVKRAEKKWRDKREKLEWETNIVYKEAKESVDALFVNSQYDRLQADTNIAMIHAADKRVHSIREAYLPELSVIPGVNAAIFEELEGRI

SEQ ID NO: 66 - protein, 940 aa, Artificial Sequence; identical to SEQ ID NO: 60
  Mutant Cry1Ab

SEQ ID NO: 67 - DNA, 2823 bp, Artificial Sequence
  Mutant cry1Ab
atggacaacaaccccaacatcaacgagtgcatcccctacaactgcctgagcaaccccgaggtggaggtgctgggcggcgagcgcatcgagaccggctacacccccatcgacatcagcctgagcctgacccagttcctgctgagcgagttcgtgcccggcgccggcttcgtgctgggcctggtggacatcatctggggcatcttcggccccagccagtgggacgccttcctggtgcagatcgagcagttgataaaccaacgcatagaggaattcgcccgcaaccaggccatcagccgcctggagggcctgagcaacctgtaccaaatctacgccgagagcttccgcgagtgggaggccgaccccaccaaccccgccctgcgcgaggagatgcgcatccagttcaacgacatgaacagcgccctgaccaccgccatccccctgttcgccgtgcagaactaccaggtgcccctgctgagcgtgtacgtgcaggccgccaacctgcacctgagcgtgctgcgcgacgtcagcgtgttcggccagcgctggggcttcgacgccgccaccatcaacagccgctacaacgacctgacccgcctgatcggcaactacaccgaccacgccgtgcgctggtacaacaccggcctggagcgcgtgtgggggcccgacagccgcgactggatcaggtacaaccagttccgccgcgagctgaccctgaccgtgctggacatcgtgagcctgttccccaactacgacagccgcacctaccccatccgcaccgtgagccagctgacccgcgagatttacaccaaccccgtgctggagaacttcgacggcagcttccgcggcagcgcccagggcatcgagggcagcatccgcagcccccacctgatggacatcctgaacagcatcaccatctacaccgacgcccaccgcggcgagtactactggagcggccaccagatcatggccagccccgtcggcttcagcggccccgagttcaccttccccctgtacggcacgatgggcaacgctgcacctcagcagcgcatcgtggcacagctgggccagggagtgtaccgcaccctgagcagcaccctgtaccgtcgacctttcaacatcggcatcaacaaccagcagctgagcgtgctggacggcaccgagttcgcctacggcaccagcagcaacctgcccagcgccgtgtaccgcaagagcggcaccgtggacagcctggacgagatcccccctcagaacaacaacgtgccacctcgacagggcttcagccaccgtctgagccacgtgagcatgttccgcagtggcttcagcaacagcagcgtgagcatcatccgtgcacctatgttcagctggattcaccgcagtgccgagttcaacaacatcatccccagcagccagatcacccagatccccctgaccaagagcaccaacctgggcagcggcaccagcgtggtgaagggccccggcttcaccggcggcgacatcctgcgccgcaccagccccggccagatcagcaccctgcgcgtgaacatcaccgcccccctgagccagcgctaccgcgtccgcatccgctacgccagcaccaccaacctgcagttccacaccagcatcgacggccgccccatcaaccagggcaacttcagcgccaccatgagcagcggcagcaacctgcagagcggcagcttccgcaccgtgggcttcaccacccccttcaacttcagcaacggcagcagcgtgttcaccctgagcgcccacgtgttcaacagcggcaacgaggtgtacatcgaccgcatcgagttcgtgcccgccgaggtgaccttcgaggccgagtacgacctggagagggctcagaaggccgtgaacgagctgttcaccagcagcaaccagatcggcctgaagaccgacgtgaccgactaccacatcgaccaggtgagcaacctggtggagtgcttaagcgacgagttctgcctggacgagaagaaggagctgagcgagaaggtgaagcacgccaagcgcctgagcgacgagcgcaacctgctgcaggaccccaacttccgcggcatcaaccgccagctggaccgcggctggcgaggcagcaccgatatcaccatccagggcggcgacgacgtgttcaaggagaactacgtgaccctgctgggcaccttcgacgagtgctaccccacctacctgtaccagaagatcgacgagagcaagctgaaggcctacacccgctaccagctgcgcggctacatcgaggacagccaggacctggaaatctacctgatccgctacaacgcgaagcacgagaccgtgaacgtgcccggcaccggcagcctgtggcccctgagcgcccccagccccatcggcaagtgcactagtcaccacagccaccacttcagcctggacatcgacgtgggctgcaccgacctgaacgaggacctgggcgtgtgggtgatcttcaagatcaagacccaggacggccacgcccgcctgggcaatctagagttcctggaggagaagcccctggtgggcgaggccctggcccgcgtgaagcgtgctgagaagaagtggcgcgacaagcgcgagaagctggagtgggagaccaacatcgtgtacaaggaggccaaggagagcgtggacgccctgttcgtgaacagccagtacgaccgcctgcaggccgacaccaacatcgccatgatccacgccgccgacaagcgcgtgcacagcattcgcgaggcctacctgcccgagctgagcgtgatccccggtgtgaacgccgccatcttcgaggaactcgagggccgcatctag

SEQ ID NO: 68 - DNA, 2880 bp, Artificial Sequence
  Mutant cry1Ab
atggacaacaaccccaacatcaacgagtgcatcccctacaactgcctgagcaaccccgaggtggaggtgctgggcggcgagcgcatcgagaccggctacacccccatcgacatcagcctgagcctgacccagttcctgctgagcgagttcgtgcccggcgccggcttcgtgctgggcctggtggacatcatctggggcatcttcggccccagccagtgggacgccttcctggtgcagatcgagcagttgataaaccaacgcatagaggaattcgcccgcaaccaggccatcagccgcctggagggcctgagcaacctgtaccaaatctacgccgagagcttccgcgagtgggaggccgaccccaccaaccccgccctgcgcgaggagatgcgcatccagttcaacgacatgaacagcgccctgaccaccgccatccccctgttcgccgtgcagaactaccaggtgcccctgctgagcgtgtacgtgcaggccgccaacctgcacctgagcgtgctgcgcgacgtcagcgtgttcggccagcgctggggcttcgacgccgccaccatcaacagccgctacaacgacctgacccgcctgatcggcaactacaccgaccacgccgtgcgctggtacaacaccggcctggagcgcgtgtgggggcccgacagccgcgactggatcaggtacaaccagttccgccgcgagctgaccctgaccgtgctggacatcgtgagcctgttccccaactacgacagccgcacctaccccatccgcaccgtgagccagctgacccgcgagatttacaccaaccccgtgctggagaacttcgacggcagcttccgcggcagcgcccagggcatcgagggcagcatccgcagcccccacctgatggacatcctgaacagcatcaccatctacaccgacgcccaccgcggcgagtactactggagcggccaccagatcatggccagccccgtcggcttcagcggccccgagttcaccttccccctgtacggcacgatgggcaacgctgcacctcagcagcgcatcgtggcacagctgggccagggagtgtaccgcaccctgagcagcaccctgtaccgtcgacctttcaacatcggcatcaacaaccagcagctgagcgtgctggacggcaccgagttcgcctacggcaccagcagcaacctgcccagcgccgtgtaccgcaagagcggcaccgtggacagcctggacgagatcccccctcagaacaacaacgtgccacctcgacagggcttcagccaccgtctgagccacgtgagcatgttccgcagtggcttcagcaacagcagcgtgagcatcatccgtgcacctatgttcagctggattcaccgcagtgccgagttcaacaacatcatccccagcagccagatcacccagatccccctgaccaagagcaccaacctgggcagcggcaccagcgtggtgaagggccccggcttcaccggcggcgacatcctgcgccgcaccagccccggccagatcagcaccctgcgcgtgaacatcaccgcccccctgagccagcgctaccgcgtccgcatccgctacgccagcaccaccaacctgcagttccacaccagcatcgacggccgccccatcaaccagggcaacttcagcgccaccatgagcagcggcagcaacctgcagagcggcagcttccgcaccgtgggcttcaccacccccttcaacttcagcaacggcagcagcgtgttcaccctgagcgcccacgtgttcaacagcggcaacgaggtgtacatcgaccgcatcgagttcgtgcccgccgaggtgaccttcgaggccgagtacgacctggagagggctcagaaggccgtgaacgagctgttcaccagcagcaaccagatcggcctgaagaccgacgtgaccgactaccacatcgaccaggtgagcaacctggtggagtgcttaagcgacgagttctgcctggacgagaagaaggagctgagcgagaaggtgaagcacgccaagcgcctgagcgacgagcgcaacctgctgcaggaccccaacttccgcggcatcaaccgccagctggaccgcggctggcgaggcagcaccgatatcaccatccagggcggcgacgacgtgttcaaggagaactacgtgaccctgctgggcaccttcgacgagtgctaccccacctacctgtaccagaagatcgacgagagcaagctgaaggcctacacccgctaccagctgcgcggctacatcgaggacagccaggacctggaaatctacctgatccgctacaacgcgaagcacgagaccgtgaacgtgcccggcaccggcagcctgtggcccctgagcgcccccagccccatcggcaagtgcactagcatccttttcattgataagaagagcaccgttcactccaactgcaaacttgtggctagtcaccacagccaccacttcagcctggacatcgacgtgggctgcaccgacctgaacgaggacctgggcgtgtgggtgatcttcaagatcaagacccaggacggccacgcccgcctgggcaatctagagttcctggaggagaagcccctggtgggcgaggccctggcccgcgtgaagcgtgctgagaagaagtggcgcgacaagcgcgagaagctggagtgggagaccaacatcgtgtacaaggaggccaaggagagcgtggacgccctgttcgtgaacagccagtacgaccgcctgcaggccgacaccaacatcgccatgatccacgccgccgacaagcgcgtgcacagcattcgcgaggcctacctgcccgagctgagcgtgatccccggtgtgaacgccgccatcttcgaggaactcgagggccgcatctag

SEQ ID NO: 69 - DNA, 2880 bp, Artificial Sequence
  Mutant cry1Ab
atggacaacaaccccaacatcaacgagtgcatcccctacaactgcctgagcaaccccgaggtggaggtgctgggcggcgagcgcatcgagaccggctacacccccatcgacatcagcctgagcctgacccagttcctgctgagcgagttcgtgcccggcgccggcttcgtgctgggcctggtggacatcatctggggcatcttcggccccagccagtgggacgccttcctggtgcagatcgagcagttgataaaccaacgcatagaggaattcgcccgcaaccaggccatcagccgcctggagggcctgagcaacctgtaccaaatctacgccgagagcttccgcgagtgggaggccgaccccaccaaccccgccctgcgcgaggagatgcgcatccagttcaacgacatgaacagcgccctgaccaccgccatccccctgttcgccgtgcagaactaccaggtgcccctgctgagcgtgtacgtgcaggccgccaacctgcacctgagcgtgctgcgcgacgtcagcgtgttcggccagcgctggggcttcgacgccgccaccatcaacagccgctacaacgacctgacccgcctgatcggcaactacaccgaccacgccgtgcgctggtacaacaccggcctggagcgcgtgtgggggcccgacagccgcgactggatcaggtacaaccagttccgccgcgagctgaccctgaccgtgctggacatcgtgagcctgttccccaactacgacagccgcacctaccccatccgcaccgtgagccagctgacccgcgagatttacaccaaccccgtgctggagaacttcgacggcagcttccgcggcagcgcccagggcatcgagggcagcatccgcagcccccacctgatggacatcctgaacagcatcaccatctacaccgacgcccaccgcggcgagtactactggagcggccaccagatcatggccagccccgtcggcttcagcggccccgagttcaccttccccctgtacggcacgatgggcaacgctgcacctcagcagcgcatcgtggcacagctgggccagggagtgtaccgcaccctgagcagcaccctgtaccgtcgacctttcaacatcggcatcaacaaccagcagctgagcgtgctggacggcaccgagttcgcctacggcaccagcagcaacctgcccagcgccgtgtaccgcaagagcggcaccgtggacagcctggacgagatcccccctcagaacaacaacgtgccacctcgacagggcttcagccaccgtctgagccacgtgagcatgttccgcagtggcttcagcaacagcagcgtgagcatcatccgtgcacctatgttcagctggattcaccgcagtgccgagttcaacaacatcatccccagcagccagatcacccagatccccctgaccaagagcaccaacctgggcagcggcaccagcgtggtgaagggccccggcttcaccggcggcgacatcctgcgccgcaccagccccggccagatcagcaccctgcgcgtgaacatcaccgcccccctgagccagcgctaccgcgtccgcatccgctacgccagcaccaccaacctgcagttccacaccagcatcgacggccgccccatcaaccagggcaacttcagcgccaccatgagcagcggcagcaacctgcagagcggcagcttccgcaccgtgggcttcaccacccccttcaacttcagcaacggcagcagcgtgttcaccctgagcgcccacgtgttcaacagcggcaacgaggtgtacatcgaccgcatcgagttcgtgcccgccgaggtgaccttcgaggccgagtacgacctggagagggctcagaaggccgtgaacgagctgttcaccagcagcaaccagatcggcctgaagaccgacgtgaccgactaccacatcgaccaggtgagcaacctggtggagtgcttaagcgacgagttctgcctggacgagaagaaggagctgagcgagaaggtgaagcacgccaagcgcctgagcgacgagcgcaacctgctgcaggaccccaacttccgcggcatcaaccgccagctggaccgcggctggcgaggcagcaccgatatcaccatccagggcggcgacgacgtgttcaaggagaactacgtgaccctgctgggcaccttcgacgagtgctaccccacctacctgtaccagaagatcgacgagagcaagctgaaggcctacacccgctaccagctgcgcggctacatcgaggacagccaggacctggaaatctacctgatccgctacaacgcgaagcacgagaccgtgaacgtgcccggcaccggcagcctgtggcccctgagcgcccccagccccatcggcaagtgcactagcacatccaacacgcacgagatgacagatagagcagtgagcagaccatctcttactagtcaccacagccaccacttcagcctggacatcgacgtgggctgcaccgacctgaacgaggacctgggcgtgtgggtgatcttcaagatcaagacccaggacggccacgcccgcctgggcaatctagagttcctggaggagaagcccctggtgggcgaggccctggcccgcgtgaagcgtgctgagaagaagtggcgcgacaagcgcgagaagctggagtgggagaccaacatcgtgtacaaggaggccaaggagagcgtggacgccctgttcgtgaacagccagtacgaccgcctgcaggccgacaccaacatcgccatgatccacgccgccgacaagcgcgtgcacagcattcgcgaggcctacctgcccgagctgagcgtgatccccggtgtgaacgccgccatcttcgaggaactcgagggccgcatctag

SEQ ID NO: 70 - DNA, 2877 bp, Artificial Sequence
  Mutant cry1Ab
atggacaacaaccccaacatcaacgagtgcatcccctacaactgcctgagcaaccccgaggtggaggtgctgggcggcgagcgcatcgagaccggctacacccccatcgacatcagcctgagcctgacccagttcctgctgagcgagttcgtgcccggcgccggcttcgtgctgggcctggtggacatcatctggggcatcttcggccccagccagtgggacgccttcctggtgcagatcgagcagttgataaaccaacgcatagaggaattcgcccgcaaccaggccatcagccgcctggagggcctgagcaacctgtaccaaatctacgccgagagcttccgcgagtgggaggccgaccccaccaaccccgccctgcgcgaggagatgcgcatccagttcaacgacatgaacagcgccctgaccaccgccatccccctgttcgccgtgcagaactaccaggtgcccctgctgagcgtgtacgtgcaggccgccaacctgcacctgagcgtgctgcgcgacgtcagcgtgttcggccagcgctggggcttcgacgccgccaccatcaacagccgctacaacgacctgacccgcctgatcggcaactacaccgaccacgccgtgcgctggtacaacaccggcctggagcgcgtgtgggggcccgacagccgcgactggatcaggtacaaccagttccgccgcgagctgaccctgaccgtgctggacatcgtgagcctgttccccaactacgacagccgcacctaccccatccgcaccgtgagccagctgacccgcgagatttacaccaaccccgtgctggagaacttcgacggcagcttccgcggcagcgcccagggcatcgagggcagcatccgcagcccccacctgatggacatcctgaacagcatcaccatctacaccgacgcccaccgcggcgagtactactggagcggccaccagatcatggccagccccgtcggcttcagcggccccgagttcaccttccccctgtacggcacgatgggcaacgctgcacctcagcagcgcatcgtggcacagctgggccagggagtgtaccgcaccctgagcagcaccctgtaccgtcgacctttcaacatcggcatcaacaaccagcagctgagcgtgctggacggcaccgagttcgcctacggcaccagcagcaacctgcccagcgccgtgtaccgcaagagcggcaccgtggacagcctggacgagatcccccctcagaacaacaacgtgccacctcgacagggcttcagccaccgtctgagccacgtgagcatgttccgcagtggcttcagcaacagcagcgtgagcatcatccgtgcacctatgttcagctggattcaccgcagtgccgagttcaacaacatcatccccagcagccagatcacccagatccccctgaccaagagcaccaacctgggcagcggcaccagcgtggtgaagggccccggcttcaccggcggcgacatcctgcgccgcaccagccccggccagatcagcaccctgcgcgtgaacatcaccgcccccctgagccagcgctaccgcgtccgcatccgctacgccagcaccaccaacctgcagttccacaccagcatcgacggccgccccatcaaccagggcaacttcagcgccaccatgagcagcggcagcaacctgcagagcggcagcttccgcaccgtgggcttcaccacccccttcaacttcagcaacggcagcagcgtgttcaccctgagcgcccacgtgttcaacagcggcaacgaggtgtacatcgaccgcatcgagttcgtgcccgccgaggtgaccttcgaggccgagtacgacctggagagggctcagaaggccgtgaacgagctgttcaccagcagcaaccagatcggcctgaagaccgacgtgaccgactaccacatcgaccaggtgagcaacctggtggagtgcttaagcgacgagttctgcctggacgagaagaaggagctgagcgagaaggtgaagcacgccaagcgcctgagcgacgagcgcaacctgctgcaggaccccaacttccgcggcatcaaccgccagctggaccgcggctggcgaggcagcaccgatatcaccatccagggcggcgacgacgtgttcaaggagaactacgtgaccctgctgggcaccttcgacgagtgctaccccacctacctgtaccagaagatcgacgagagcaagctgaaggcctacacccgctaccagctgcgcggctacatcgaggacagccaggacctggaaatctacctgatccgctacaacgcgaagcacgagaccgtgaacgtgcccggcaccggcagcctgtggcccctgagcgcccccagccccatcggcaagtgcactagcatctctgttgcctttttgattgaaccgtgccaacagcttgttggatttactagtcaccacagccaccacttcagcctggacatcgacgtgggctgcaccgacctgaacgaggacctgggcgtgtgggtgatcttcaagatcaagacccaggacggccacgcccgcctgggcaatctagagttcctggaggagaagcccctggtgggcgaggccctggcccgcgtgaagcgtgctgagaagaagtggcgcgacaagcgcgagaagctggagtgggagaccaacatcgtgtacaaggaggccaaggagagcgtggacgccctgttcgtgaacagccagtacgaccgcctgcaggccgacaccaacatcgccatgatccacgccgccgacaagcgcgtgcacagcattcgcgaggcctacctgcccgagctgagcgtgatccccggtgtgaacgccgccatcttcgaggaactcgagggccgcatctag

SEQ ID NO: 71 - DNA, 2880 bp, Artificial Sequence
  Mutant cry1Ab
atggacaacaaccccaacatcaacgagtgcatcccctacaactgcctgagcaaccccgaggtggaggtgctgggcggcgagcgcatcgagaccggctacacccccatcgacatcagcctgagcctgacccagttcctgctgagcgagttcgtgcccggcgccggcttcgtgctgggcctggtggacatcatctggggcatcttcggccccagccagtgggacgccttcctggtgcagatcgagcagttgataaaccaacgcatagaggaattcgcccgcaaccaggccatcagccgcctggagggcctgagcaacctgtaccaaatctacgccgagagcttccgcgagtgggaggccgaccccaccaaccccgccctgcgcgaggagatgcgcatccagttcaacgacatgaacagcgccctgaccaccgccatccccctgttcgccgtgcagaactaccaggtgcccctgctgagcgtgtacgtgcaggccgccaacctgcacctgagcgtgctgcgcgacgtcagcgtgttcggccagcgctggggcttcgacgccgccaccatcaacagccgctacaacgacctgacccgcctgatcggcaactacaccgaccacgccgtgcgctggtacaacaccggcctggagcgcgtgtgggggcccgacagccgcgactggatcaggtacaaccagttccgccgcgagctgaccctgaccgtgctggacatcgtgagcctgttccccaactacgacagccgcacctaccccatccgcaccgtgagccagctgacccgcgagatttacaccaaccccgtgctggagaacttcgacggcagcttccgcggcagcgcccagggcatcgagggcagcatccgcagcccccacctgatggacatcctgaacagcatcaccatctacaccgacgcccaccgcggcgagtactactggagcggccaccagatcatggccagccccgtcggcttcagcggccccgagttcaccttccccctgtacggcacgatgggcaacgctgcacctcagcagcgcatcgtggcacagctgggccagggagtgtaccgcaccctgagcagcaccctgtaccgtcgacctttcaacatcggcatcaacaaccagcagctgagcgtgctggacggcaccgagttcgcctacggcaccagcagcaacctgcccagcgccgtgtaccgcaagagcggcaccgtggacagcctggacgagatcccccctcagaacaacaacgtgccacctcgacagggcttcagccaccgtctgagccacgtgagcatgttccgcagtggcttcagcaacagcagcgtgagcatcatccgtgcacctatgttcagctggattcaccgcagtgccgagttcaacaacatcatccccagcagccagatcacccagatccccctgaccaagagcaccaacctgggcagcggcaccagcgtggtgaagggccccggcttcaccggcggcgacatcctgcgccgcaccagccccggccagatcagcaccctgcgcgtgaacatcaccgcccccctgagccagcgctaccgcgtccgcatccgctacgccagcaccaccaacctgcagttccacaccagcatcgacggccgccccatcaaccagggcaacttcagcgccaccatgagcagcggcagcaacctgcagagcggcagcttccgcaccgtgggcttcaccacccccttcaacttcagcaacggcagcagcgtgttcaccctgagcgcccacgtgttcaacagcggcaacgaggtgtacatcgaccgcatcgagttcgtgcccgccgaggtgaccttcgaggccgagtacgacctggagagggctcagaaggccgtgaacgagctgttcaccagcagcaaccagatcggcctgaagaccgacgtgaccgactaccacatcgaccaggtgagcaacctggtggagtgcttaagcgacgagttctgcctggacgagaagaaggagctgagcgagaaggtgaagcacgccaagcgcctgagcgacgagcgcaacctgctgcaggaccccaacttccgcggcatcaaccgccagctggaccgcggctggcgaggcagcaccgatatcaccatccagggcggcgacgacgtgttcaaggagaactacgtgaccctgctgggcaccttcgacgagtgctaccccacctacctgtaccagaagatcgacgagagcaagctgaaggcctacacccgctaccagctgcgcggctacatcgaggacagccaggacctggaaatctacctgatccgctacaacgcgaagcacgagaccgtgaacgtgcccggcaccggcagcctgtggcccctgagcgcccccagccccatcggcaagtgcactagcgacgaccccaaaggacaggtttcccacagctttattgaacaattgtttgcatctagtcaccacagccaccacttcagcctggacatcgacgtgggctgcaccgacctgaacgaggacctgggcgtgtgggtgatcttcaagatcaagacccaggacggccacgcccgcctgggcaatctagagttcctggaggagaagcccctggtgggcgaggccctggcccgcgtgaagcgtgctgagaagaagtggcgcgacaagcgcgagaagctggagtgggagaccaacatcgtgtacaaggaggccaaggagagcgtggacgccctgttcgtgaacagccagtacgaccgcctgcaggccgacaccaacatcgccatgatccacgccgccgacaagcgcgtgcacagcattcgcgaggcctacctgcccgagctgagcgtgatccccggtgtgaacgccgccatcttcgaggaactcgagggccgcatctag

SEQ ID NO: 72 - DNA, 2877 bp, Artificial Sequence
  Mutant cry1Ab
atggacaacaaccccaacatcaacgagtgcatcccctacaactgcctgagcaaccccgaggtggaggtgctgggcggcgagcgcatcgagaccggctacacccccatcgacatcagcctgagcctgacccagttcctgctgagcgagttcgtgcccggcgccggcttcgtgctgggcctggtggacatcatctggggcatcttcggccccagccagtgggacgccttcctggtgcagatcgagcagttgataaaccaacgcatagaggaattcgcccgcaaccaggccatcagccgcctggagggcctgagcaacctgtaccaaatctacgccgagagcttccgcgagtgggaggccgaccccaccaaccccgccctgcgcgaggagatgcgcatccagttcaacgacatgaacagcgccctgaccaccgccatccccctgttcgccgtgcagaactaccaggtgcccctgctgagcgtgtacgtgcaggccgccaacctgcacctgagcgtgctgcgcgacgtcagcgtgttcggccagcgctggggcttcgacgccgccaccatcaacagccgctacaacgacctgacccgcctgatcggcaactacaccgaccacgccgtgcgctggtacaacaccggcctggagcgcgtgtgggggcccgacagccgcgactggatcaggtacaaccagttccgccgcgagctgaccctgaccgtgctggacatcgtgagcctgttccccaactacgacagccgcacctaccccatccgcaccgtgagccagctgacccgcgagatttacaccaaccccgtgctggagaacttcgacggcagcttccgcggcagcgcccagggcatcgagggcagcatccgcagcccccacctgatggacatcctgaacagcatcaccatctacaccgacgcccaccgcggcgagtactactggagcggccaccagatcatggccagccccgtcggcttcagcggccccgagttcaccttccccctgtacggcacgatgggcaacgctgcacctcagcagcgcatcgtggcacagctgggccagggagtgtaccgcaccctgagcagcaccctgtaccgtcgacctttcaacatcggcatcaacaaccagcagctgagcgtgctggacggcaccgagttcgcctacggcaccagcagcaacctgcccagcgccgtgtaccgcaagagcggcaccgtggacagcctggacgagatcccccctcagaacaacaacgtgccacctcgacagggcttcagccaccgtctgagccacgtgagcatgttccgcagtggcttcagcaacagcagcgtgagcatcatccgtgcacctatgttcagctggattcaccgcagtgccgagttcaacaacatcatccccagcagccagatcacccagatccccctgaccaagagcaccaacctgggcagcggcaccagcgtggtgaagggccccggcttcaccggcggcgacatcctgcgccgcaccagccccggccagatcagcaccctgcgcgtgaacatcaccgcccccctgagccagcgctaccgcgtccgcatccgctacgccagcaccaccaacctgcagttccacaccagcatcgacggccgccccatcaaccagggcaacttcagcgccaccatgagcagcggcagcaacctgcagagcggcagcttccgcaccgtgggcttcaccacccccttcaacttcagcaacggcagcagcgtgttcaccctgagcgcccacgtgttcaacagcggcaacgaggtgtacatcgaccgcatcgagttcgtgcccgccgaggtgaccttcgaggccgagtacgacctggagagggctcagaaggccgtgaacgagctgttcaccagcagcaaccagatcggcctgaagaccgacgtgaccgactaccacatcgaccaggtgagcaacctggtggagtgcttaagcgacgagttctgcctggacgagaagaaggagctgagcgagaaggtgaagcacgccaagcgcctgagcgacgagcgcaacctgctgcaggaccccaacttccgcggcatcaaccgccagctggaccgcggctggcgaggcagcaccgatatcaccatccagggcggcgacgacgtgttcaaggagaactacgtgaccctgctgggcaccttcgacgagtgctaccccacctacctgtaccagaagatcgacgagagcaagctgaaggcctacacccgctaccagctgcgcggctacatcgaggacagccaggacctggaaatctacctgatccgctacaacgcgaagcacgagaccgtgaacgtgcccggcaccggcagcctgtggcccctgagcgcccccagccccatcggcaagtgcactagtcctttctctctctttctttctctctgctttattgaacttctcaaagttactagtcaccacagccaccacttcagcctggacatcgacgtgggctgcaccgacctgaacgaggacctgggcgtgtgggtgatcttcaagatcaagacccaggacggccacgcccgcctgggcaatctagagttcctggaggagaagcccctggtgggcgaggccctggcccgcgtgaagcgtgctgagaagaagtggcgcgacaagcgcgagaagctggagtgggagaccaacatcgtgtacaaggaggccaaggagagcgtggacgccctgttcgtgaacagccagtacgaccgcctgcaggccgacaccaacatcgccatgatccacgccgccgacaagcgcgtgcacagcattcgcgaggcctacctgcccgagctgagcgtgatccccggtgtgaacgccgccatcttcgaggaactcgagggccgcatctag

SEQ ID NO: 73 - DNA, 2823 bp, Artificial Sequence; identical to SEQ ID NO: 67
  Mutant cry1Ab

SEQ ID NO: 74 - RNA, 52 nt, Artificial Sequence
  23708 target insertion sequence
ugaugcacagauugggaugagauauuggaggaaaacaaagagggacugacaa

SEQ ID NO: 75 - RNA, 51 nt, Artificial Sequence
  23711 target insertion sequence
ugucccucacuacguccgguucaguugccucuaauccuaucccucgccacg

SEQ ID NO: 76 - RNA, 52 nt, Artificial Sequence
  23712 target insertion sequence
uauacgcacacacauguugagauauuagaggaaacugaagaauuacgccaca

SEQ ID NO: 77 - RNA, 52 nt, Artificial Sequence
  23715 target insertion sequence
cgccaaaugaaucuucuugagauuuuagaguaaacugaaacugacuguugca

SEQ ID NO: 78 - RNA, 54 nt, Artificial Sequence
  23716 target insertion sequence
uauacgcacacacauguugagauauuagaggaaacugaagaauuacgccacauu

SEQ ID NO: 79 - DNA, 52 bp, Artificial Sequence
  23708 target insertion sequence
tgatgcacagattgggatgagatattggaggaaaacaaagagggactgacaa

SEQ ID NO: 80 - DNA, 51 bp, Artificial Sequence
  23711 target insertion sequence
tgtccctcactacgtccggttcagttgcctctaatcctatccctcgccacg

SEQ ID NO: 81 - DNA, 52 bp, Artificial Sequence
  23712 target insertion sequence
tatacgcacacacatgttgagatattagaggaaactgaagaattacgccaca

SEQ ID NO: 82 - DNA, 52 bp, Artificial Sequence
  23715 target insertion sequence
cgccaaatgaatcttcttgagattttagagtaaactgaaactgactgttgca

SEQ ID NO: 83 - DNA, 54 bp, Artificial Sequence
  23716 target insertion sequence
tatacgcacacacatgttgagatattagaggaaactgaagaattacgccacatt

SEQ ID NO: 84 - DNA, 4579 bp, Artificial Sequence
  23705 vip3 expression cassette
ctgcagtgcagcgtgacccggtcgtgcccctctctagagataatgagcattgcatgtctaagttataaaaaattaccacatattttttttgtcacacttgtttgaagtgcagtttatctatctttatacatatatttaaactttactctacgaataatataatctatagtactacaataatatcagtgttttagagaatcatataaatgaacagttagacatggtctaaaggacaattgagtattttgacaacaggactctacagttttatctttttagtgtgcatgtgttctcctttttttttgcaaatagcttcacctatataatacttcatccattttattagtacatccatttagggtttagggttaatggtttttatagactaatttttttagtacatctattttattctattttagcctctaaattaagaaaactaaaactctattttagtttttttatttaataatttagatataaaatagaataaaataaagtgactaaaaattaaacaaataccctttaagaaattaaaaaaactaaggaaacatttttcttgtttcgagtagataatgccagcctgttaaacgccgtcgacgagtctaacggacaccaaccagcgaaccagcagcgtcgcgtcgggccaagcgaagcagacggcacggcatctctgtcgctgcctctggacccctctcgagagttccgctccaccgttggacttgctccgctgtcggcatccagaaattgcgtggcggagcggcagacgtgagccggcacggcaggcggcctcctcctcctctcacggcaccggcagctacgggggattcctttcccaccgctccttcgctttcccttcctcgcccgccgtaataaatagacaccccctccacaccctctttccccaacctcgtgttgttcggagcgcacacacacacaaccagatctcccccaaatccacccgtcggcacctccgcttcctaggtacgccgctcgtcctccccccccccccctctctaccttctctagatcggcgttccggtccatagttagggcccggtagttctacttctgttcatgtttgtgttagatccgtgtttgtgttagatccgtgctgctagcgttcgtacacggatgcgacctgtacgtcagacacgttctgattgctaacttgccagtgtttctctttggggaatcctgggatggctctagccgttccgcagacgggatcgatttcatgattttttttgtttcgttgcatagggtttggtttgcccttttcctttatttcaatatatgccgtgcacttgtttgtcgggtcatcttttcatgcttttttttgtcttggttgtgatgatgtggtctggttgggcggtcgttctagatcggagtagaattctgtttcaaactacctggtggatttattaattttggatctgtatgtgtgtgccatacatattcatagttacgaattgaagatgatggatggaaatatcgatctaggataggtatacatgttgatgcgggttttactgatgcatatacagagatgctttttgttcgcttggttgtgatgatgtggtgtggttgggcggtcgttcattcgttctagatcggagtagaatactgtttcaaactacctggtgtatttattaattttggaactgtatgtgtgtgtcatacatcttcatagttacgagtttaagatggatggaaatatcgatctaggataggtatacatgttgatgtgggttttactgatgcatatacatgatggcatatgcagcatctattcatatgctctaaccttgagtacctatctattataataaacaagtatgttttataattattttgatcttgatatacttggatgatggcatatccagcagctatatgtggatttttttagccctgccttcatacgctatttatttgcttggtactgtttcttttgtcgatgctcaccctgttgtttggtgttacttctgcaggatcctctaagtagcagccatgaacaagaacaacaccaagctgagcacccgcgccctgccgagcttcatcgactacttcaacggcatctacggcttcgccaccggcatcaaggacatcatgaacatgatcttcaagaccgacaccggcggcgacctgaccctggacgagatcctgaagaaccagcagctgctgaacgacatcagcggcaagctggacggcgtgaacggcagcctgaacgacctgatcgcccagggcaacctgaacaccgagctgagcaaggagatccttaagatcgccaacgagcagaaccaggtgctgaacgacgtgaacaacaagctggacgccatcaacaccatgctgcgcgtgtacctgccgaagatcaccagcatgctgagcgacgtgattaagcagaactacgccctgagcctgcagatcgagtacctgagcaagcagctgcaggagatcagcgacaagctggacatcatcaacgtgaacgtcctgatcaacagcaccctgaccgagatcaccccggcctaccagcgcatcaagtacgtgaacgagaagttcgaagagctgaccttcgccaccgagaccagcagcaaggtgaagaaggacggcagcccggccgacatcctggacgagctgaccgagctgaccgagctggcgaagagcgtgaccaagaacgacgtggacggcttcgagttctacctgaacaccttccacgacgtgatggtgggcaacaacctgttcggccgcagcgccctgaagaccgccagcgagctgatcaccaaggagaacgtgaagaccagcggcagcgaggtgggcaacgtgtacaacttcctgatcgtgctgaccgccctgcaggcccaggccttcctgaccctgaccacctgtcgcaagctgctgggcctggccgacatcgactacaccagcatcatgaacgagcacttgaacaaggagaaggaggagttccgcgtgaacatcctgccgaccctgagcaacaccttcagcaacccgaactacgccaaggtgaagggcagcgacgaggacgccaagatgatcgtggaggctaagccgggccacgcgttgatcggcttcgagatcagcaacgacagcatcaccgtgctgaaggtgtacgaggccaagctgaagcagaactaccaggtggacaaggacagcttgagcgaggtgatctacggcgacatggacaagctgctgtgtccggaccagagcgagcaaatctactacaccaacaacatcgtgttcccgaacgagtacgtgatcaccaagatcgacttcaccaagaagatgaagaccctgcgctacgaggtgaccgccaacttctacgacagcagcaccggcgagatcgacctgaacaagaagaaggtggagagcagcgaggccgagtaccgcaccctgagcgcgaacgacgacggcgtctacatgccactgggcgtgatcagcgagaccttcctgaccccgatcaacggctttggcctgcaggccgacgagaacagccgcctgatcaccctgacctgtaagagctacctgcgcgagctgctgctagccaccgacctgagcaacaaggagaccaagctgatcgtgccaccgagcggcttcatcagcaacatcgtggagaacggcagcatcgaggaggacaacctggagccgtggaaggccaacaacaagaacgcctacgtcgaccacaccggcggcgtgaacggcaccaaggccctgtacgtgcacaaggacggcggcatcagccagttcatcggcgacaagctgaagccgaagaccgagtacgtgatccagtacaccgtgaagggcaagccatcgattcacctgaaggacgagaacaccggctacatccactacgaggacaccaacaacaacctggaggactaccagaccatcaacaagcgcttcaccaccggcaccgacctgaagggcgtgtacctgatcctgaagagccagaacggcgacgaggcctggggcgacaacttcatcatcctggagatcagcccgagcgagaagctgctgagcccggagctgatcaacaccaacaactggaccagcaccggcagcaccaacatcagcggcaacaccctgaccctgtaccagggcggccgcggcatcctgaagcagaacctgcagctggacagcttcagcacctaccgcgtgtacttcagcgtgagcggcgacgccaacgtgcgcatccgcaactcccgcgaggtgctgttcgagaagaggtacatgagcggcgccaaggacgtgagcgagatgttcaccaccaagttcgagaaggacaacttctacatcgagctgagccagggcaacaacctgtacggcggcccgatcgtgcacttctacgacgtgagcatcaagtaggagctctagatcttatctgcacaaagtggagtagtcagtcatcgatcaggaaccagacaccagacttttattcatacagtgaagtgaagtgaagtgcagtgcagtgagttgctggtttttgtacaacttagtatgtatttgtatttgtaaaatacttctatcaataaaatttctaattcctaaaaccaaaatccag

SEQ ID NO: 85 - DNA, 4625 bp, Artificial Sequence
  23708 vip3 expression cassette
ctgcagtgcagcgtgacccggtcgtgcccctctctagagataatgagcattgcatgtctaagttataaaaaattaccacatattttttttgtcacacttgtttgaagtgcagtttatctatctttatacatatatttaaactttactctacgaataatataatctatagtactacaataatatcagtgttttagagaatcatataaatgaacagttagacatggtctaaaggacaattgagtattttgacaacaggactctacagttttatctttttagtgtgcatgtgttctcctttttttttgcaaatagcttcacctatataatacttcatccattttattagtacatccatttagggtttagggttaatggtttttatagactaatttttttagtacatctattttattctattttagcctctaaattaagaaaactaaaactctattttagtttttttatttaataatttagatataaaatagaataaaataaagtgactaaaaattaaacaaataccctttaagaaattaaaaaaactaaggaaacatttttcttgtttcgagtagataatgccagcctgttaaacgccgtcgacgagtctaacggacaccaaccagcgaaccagcagcgtcgcgtcgggccaagcgaagcagacggcacggcatctctgtcgctgcctctggacccctctcgagagttccgctccaccgttggacttgctccgctgtcggcatccagaaattgcgtggcggagcggcagacgtgagccggcacggcaggcggcctcctcctcctctcacggcaccggcagctacgggggattcctttcccaccgctccttcgctttcccttcctcgcccgccgtaataaatagacaccccctccacaccctctttccccaacctcgtgttgttcggagcgcacacacacacaaccagatctcccccaaatccacccgtcggcacctccgcttcctaggtacgccgctcgtcctccccccccccccctctctaccttctctagatcggcgttccggtccatagttagggcccggtagttctacttctgttcatgtttgtgttagatccgtgtttgtgttagatccgtgctgctagcgttcgtacacggatgcgacctgtacgtcagacacgttctgattgctaacttgccagtgtttctctttggggaatcctgggatggctctagccgttccgcagacgggatcgatttcatgattttttttgtttcgttgcatagggtttggtttgcccttttcctttatttcaatatatgccgtgcacttgtttgtcgggtcatcttttcatgcttttttttgtcttggttgtgatgatgtggtctggttgggcggtcgttctagatcggagtagaattctgtttcaaactacctggtggatttattaattttggatctgtatgtgtgtgccatacatattcatagttacgaattgaagatgatggatggaaatatcgatctaggataggtatacatgttgatgcgggttttactgatgcatatacagagatgctttttgttcgcttggttgtgatgatgtggtgtggttgggcggtcgttcattcgttctagatcggagtagaatactgtttcaaactacctggtgtatttattaattttggaactgtatgtgtgtgtcatacatcttcatagttacgagtttaagatggatggaaatatcgatctaggataggtatacatgttgatgtgggttttactgatgcatatacatgatggcatatgcagcatctattcatatgctctaaccttgagtacctatctattataataaacaagtatgttttataattattttgatcttgatatacttggatgatggcatatccagcagctatatgtggatttttttagccctgccttcatacgctatttatttgcttggtactgtttcttttgtcgatgctcaccctgttgtttggtgttacttctgcaggatcctctaagtagcagccatgaacaagaacaacaccaagctgagcacccgcgccctgccgagcttcatcgactacttcaacggcatctacggcttcgccaccggcatcaaggacatcatgaacatgatcttcaagaccgacaccggcggcgacctgaccctggacgagatcctgaagaaccagcagctgctgaacgacatcagcggcaagctggacggcgtgaacggcagcctgaacgacctgatcgcccagggcaacctgaacaccgagctgagcaaggagatccttaagatcgccaacgagcagaaccaggtgctgaacgacgtgaacaacaagctggacgccatcaacaccatgctgcgcgtgtacctgccgaagatcaccagcatgctgagcgacgtgattaagcagaactacgccctgagcctgcagatcgagtacctgagcaagcagctgcaggagatcagcgacaagctggacatcatcaacgtgaacgtcctgatcaacagcaccctgaccgagatcaccccggcctaccagcgcatcaagtacgtgaacgagaagttcgaagagctgaccttcgccaccgagaccagcagcaaggtgaagaaggacggcagcccggccgacatcctggacgagctgaccgagctgaccgagctggcgaagagcgtgaccaagaacgacgtggacggcttcgagttctacctgaacaccttccacgacgtgatggtgggcaacaacctgttcggccgcagcgccctgaagaccgccagcgagctgatcaccaaggagaacgtgaagaccagcggcagcgaggtgggcaacgtgtacaacttcctgatcgtgctgaccgccctgcaggcccaggccttcctgaccctgaccacctgtcgcaagctgctgggcctggccgacatcgactacaccagcatcatgaacgagcacttgaacaaggagaaggaggagttccgcgtgaacatcctgccgaccctgagcaacaccttcagcaacccgaactacgccaaggtgaagggcagcgacgaggacgccaagatgatcgtggaggctaagccgggccacgcgttgatcggcttcgagatcagcaacgacagcatcaccgtgctgaaggtgtacgaggccaagctgaagcagaactaccaggtggacaaggacagcttgagcgaggtgatctacggcgacatggacaagctgctgtgtccggaccagagcgagcaaatctactacaccaacaacatcgtgttcccgaacgagtacgtgatcaccaagatcgacttcaccaagaagatgaagaccctgcgctacgaggtgaccgccaacttctacgacagcagcaccggcgagatcgacctgaacaagaagaaggtggagagcagcgaggccgagtaccgcaccctgagcgcgaacgacgacggcgtctacatgccactgggcgtgatcagcgagaccttcctgaccccgatcaacggctttggcctgcaggccgacgagaacagccgcctgatcaccctgacctgtaagagctacctgcgcgagctgctgctagccaccgacctgagcaacaaggagaccaagctgatcgtgccaccgagcggcttcatcagcaacatcgtggagaacggcagcatcgaggaggacaacctggagccgtggaaggccaacaacaagaacgcctacgtcgaccacaccggcggcgtgaacggcaccaaggccctgtacgtgcacaaggacggcggcatcagccagttcatcggcgacaagctgaagccgaagaccgagtacgtgatccagtacaccgtgaagggcaagccatcgattcacctgaaggacgagaacaccggctacatccactacgaggacaccaacaacaacctggaggactaccagaccatcaacaagcgcttcaccaccggcaccgacctgaagggcgtgtacctgatcctgaagagccagaacggcgacgaggcctggggcgacaacttcatcatcctggagatcagcccgagcgagaagctgctgagcccggagctgatcaacaccaacaactggaccagcaccggcagcaccaacatcagcggcaacaccctgaccctgtaccagggcggccgcggcatcctgaagcagaacctgcagctggacagcttcagcacctaccgcgtgtacttcagcgtgagcggcgacgccaacgtgcgcatccgcaactcccgcgaggtgctgttcgagaagaggtacatgagcggcgccaaggacgtgagcgagatgttcaccaccaagttcgagaaggacaacttctacatcgagctgagccagggcaacaacctgtacggcggcccgatcgtgcacttctacgacgtgagcatcaagtaggagctctgatgcacagattgggatgagatattggaggaaaacaaagagggactgacaattatctgcacaaagtggagtagtcagtcatcgatcaggaaccagacaccagacttttattcatacagtgaagtgaagtgaagtgcagtgcagtgagttgctggtttttgtacaacttagtatgtatttgtatttgtaaaatacttctatcaataaaatttctaattcctaaaaccaaaatccag

SEQ ID NO: 86 - DNA, 4624 bp, Artificial Sequence
  23711 vip3 expression cassette
ctgcagtgcagcgtgacccggtcgtgcccctctctagagataatgagcattgcatgtctaagttataaaaaattaccacatattttttttgtcacacttgtttgaagtgcagtttatctatctttatacatatatttaaactttactctacgaataatataatctatagtactacaataatatcagtgttttagagaatcatataaatgaacagttagacatggtctaaaggacaattgagtattttgacaacaggactctacagttttatctttttagtgtgcatgtgttctcctttttttttgcaaatagcttcacctatataatacttcatccattttattagtacatccatttagggtttagggttaatggtttttatagactaatttttttagtacatctattttattctattttagcctctaaattaagaaaactaaaactctattttagtttttttatttaataatttagatataaaatagaataaaataaagtgactaaaaattaaacaaataccctttaagaaattaaaaaaactaaggaaacatttttcttgtttcgagtagataatgccagcctgttaaacgccgtcgacgagtctaacggacaccaaccagcgaaccagcagcgtcgcgtcgggccaagcgaagcagacggcacggcatctctgtcgctgcctctggacccctctcgagagttccgctccaccgttggacttgctccgctgtcggcatccagaaattgcgtggcggagcggcagacgtgagccggcacggcaggcggcctcctcctcctctcacggcaccggcagctacgggggattcctttcccaccgctccttcgctttcccttcctcgcccgccgtaataaatagacaccccctccacaccctctttccccaacctcgtgttgttcggagcgcacacacacacaaccagatctcccccaaatccacccgtcggcacctccgcttcctaggtacgccgctcgtcctccccccccccccctctctaccttctctagatcggcgttccggtccatagttagggcccggtagttctacttctgttcatgtttgtgttagatccgtgtttgtgttagatccgtgctgctagcgttcgtacacggatgcgacctgtacgtcagacacgttctgattgctaacttgccagtgtttctctttggggaatcctgggatggctctagccgttccgcagacgggatcgatttcatgattttttttgtttcgttgcatagggtttggtttgcccttttcctttatttcaatatatgccgtgcacttgtttgtcgggtcatcttttcatgcttttttttgtcttggttgtgatgatgtggtctggttgggcggtcgttctagatcggagtagaattctgtttcaaactacctggtggatttattaattttggatctgtatgtgtgtgccatacatattcatagttacgaattgaagatgatggatggaaatatcgatctaggataggtatacatgttgatgcgggttttactgatgcatatacagagatgctttttgttcgcttggttgtgatgatgtggtgtggttgggcggtcgttcattcgttctagatcggagtagaatactgtttcaaactacctggtgtatttattaattttggaactgtatgtgtgtgtcatacatcttcatagttacgagtttaagatggatggaaatatcgatctaggataggtatacatgttgatgtgggttttactgatgcatatacatgatggcatatgcagcatctattcatatgctctaaccttgagtacctatctattataataaacaagtatgttttataattattttgatcttgatatacttggatgatggcatatccagcagctatatgtggatttttttagccctgccttcatacgctatttatttgcttggtactgtttcttttgtcgatgctcaccctgttgtttggtgttacttctgcaggatcctctaagtagcagccatgaacaagaacaacaccaagctgagcacccgcgccctgccgagcttcatcgactacttcaacggcatctacggcttcgccaccggcatcaaggacatcatgaacatgatcttcaagaccgacaccggcggcgacctgaccctggacgagatcctgaagaaccagcagctgctgaacgacatcagcggcaagctggacggcgtgaacggcagcctgaacgacctgatcgcccagggcaacctgaacaccgagctgagcaaggagatccttaagatcgccaacgagcagaaccaggtgctgaacgacgtgaacaacaagctggacgccatcaacaccatgctgcgcgtgtacctgccgaagatcaccagcatgctgagcgacgtgattaagcagaactacgccctgagcctgcagatcgagtacctgagcaagcagctgcaggagatcagcgacaagctggacatcatcaacgtgaacgtcctgatcaacagcaccctgaccgagatcaccccggcctaccagcgcatcaagtacgtgaacgagaagttcgaagagctgaccttcgccaccgagaccagcagcaaggtgaagaaggacggcagcccggccgacatcctggacgagctgaccgagctgaccgagctggcgaagagcgtgaccaagaacgacgtggacggcttcgagttctacctgaacaccttccacgacgtgatggtgggcaacaacctgttcggccgcagcgccctgaagaccgccagcgagctgatcaccaaggagaacgtgaagaccagcggcagcgaggtgggcaacgtgtacaacttcctgatcgtgctgaccgccctgcaggcccaggccttcctgaccctgaccacctgtcgcaagctgctgggcctggccgacatcgactacaccagcatcatgaacgagcacttgaacaaggagaaggaggagttccgcgtgaacatcctgccgaccctgagcaacaccttcagcaacccgaactacgccaaggtgaagggcagcgacgaggacgccaagatgatcgtggaggctaagccgggccacgcgttgatcggcttcgagatcagcaacgacagcatcaccgtgctgaaggtgtacgaggccaagctgaagcagaactaccaggtggacaaggacagcttgagcgaggtgatctacggcgacatggacaagctgctgtgtccggaccagagcgagcaaatctactacaccaacaacatcgtgttcccgaacgagtacgtgatcaccaagatcgacttcaccaagaagatgaagaccctgcgctacgaggtgaccgccaacttctacgacagcagcaccggcgagatcgacctgaacaagaagaaggtggagagcagcgaggccgagtaccgcaccctgagcgcgaacgacgacggcgtctacatgccactgggcgtgatcagcgagaccttcctgaccccgatcaacggctttggcctgcaggccgacgagaacagccgcctgatcaccctgacctgtaagagctacctgcgcgagctgctgctagccaccgacctgagcaacaaggagaccaagctgatcgtgccaccgagcggcttcatcagcaacatcgtggagaacggcagcatcgaggaggacaacctggagccgtggaaggccaacaacaagaacgcctacgtcgaccacaccggcggcgtgaacggcaccaaggccctgtacgtgcacaaggacggcggcatcagccagttcatcggcgacaagctgaagccgaagaccgagtacgtgatccagtacaccgtgaagggcaagccatcgattcacctgaaggacgagaacaccggctacatccactacgaggacaccaacaacaacctggaggactaccagaccatcaacaagcgcttcaccaccggcaccgacctgaagggcgtgtacctgatcctgaagagccagaacggcgacgaggcctggggcgacaacttcatcatcctggagatcagcccgagcgagaagctgctgagcccggagctgatcaacaccaacaactggaccagcaccggcagcaccaacatcagcggcaacaccctgaccctgtaccagggcggccgcggcatcctgaagcagaacctgcagctggacagcttcagcacctaccgcgtgtacttcagcgtgagcggcgacgccaacgtgcgcatccgcaactcccgcgaggtgctgttcgagaagaggtacatgagcggcgccaaggacgtgagcgagatgttcaccaccaagttcgagaaggacaacttctacatcgagctgagccagggcaacaacctgtacggcggcccgatcgtgcacttctacgacgtgagcatcaagtaggagctctgtccctcactacgtccggttcagttgcctctaatcctatccctcgccacgttatctgcacaaagtggagtagtcagtcatcgatcaggaaccagacaccagacttttattcatacagtgaagtgaagtgaagtgcagtgcagtgagttgctggtttttgtacaacttagtatgtatttgtatttgtaaaatacttctatcaataaaatttctaattcctaaaaccaaaatccag

SEQ ID NO: 87 - DNA, 4625 bp, Artificial Sequence
  23712 vip3 expression cassette
ctgcagtgcagcgtgacccggtcgtgcccctctctagagataatgagcattgcatgtctaagttataaaaaattaccacatattttttttgtcacacttgtttgaagtgcagtttatctatctttatacatatatttaaactttactctacgaataatataatctatagtactacaataatatcagtgttttagagaatcatataaatgaacagttagacatggtctaaaggacaattgagtattttgacaacaggactctacagttttatctttttagtgtgcatgtgttctcctttttttttgcaaatagcttcacctatataatacttcatccattttattagtacatccatttagggtttagggttaatggtttttatagactaatttttttagtacatctattttattctattttagcctctaaattaagaaaactaaaactctattttagtttttttatttaataatttagatataaaatagaataaaataaagtgactaaaaattaaacaaataccctttaagaaattaaaaaaactaaggaaacatttttcttgtttcgagtagataatgccagcctgttaaacgccgtcgacgagtctaacggacaccaaccagcgaaccagcagcgtcgcgtcgggccaagcgaagcagacggcacggcatctctgtcgctgcctctggacccctctcgagagttccgctccaccgttggacttgctccgctgtcggcatccagaaattgcgtggcggagcggcagacgtgagccggcacggcaggcggcctcctcctcctctcacggcaccggcagctacgggggattcctttcccaccgctccttcgctttcccttcctcgcccgccgtaataaatagacaccccctccacaccctctttccccaacctcgtgttgttcggagcgcacacacacacaaccagatctcccccaaatccacccgtcggcacctccgcttcctaggtacgccgctcgtcctccccccccccccctctctaccttctctagatcggcgttccggtccatagttagggcccggtagttctacttctgttcatgtttgtgttagatccgtgtttgtgttagatccgtgctgctagcgttcgtacacggatgcgacctgtacgtcagacacgttctgattgctaacttgccagtgtttctctttggggaatcctgggatggctctagccgttccgcagacgggatcgatttcatgattttttttgtttcgttgcatagggtttggtttgcccttttcctttatttcaatatatgccgtgcacttgtttgtcgggtcatcttttcatgcttttttttgtcttggttgtgatgatgtggtctggttgggcggtcgttctagatcggagtagaattctgtttcaaactacctggtggatttattaattttggatctgtatgtgtgtgccatacatattcatagttacgaattgaagatgatggatggaaatatcgatctaggataggtatacatgttgatgcgggttttactgatgcatatacagagatgctttttgttcgcttggttgtgatgatgtggtgtggttgggcggtcgttcattcgttctagatcggagtagaatactgtttcaaactacctggtgtatttattaattttggaactgtatgtgtgtgtcatacatcttcatagttacgagtttaagatggatggaaatatcgatctaggataggtatacatgttgatgtgggttttactgatgcatatacatgatggcatatgcagcatctattcatatgctctaaccttgagtacctatctattataataaacaagtatgttttataattattttgatcttgatatacttggatgatggcatatccagcagctatatgtggatttttttagccctgccttcatacgctatttatttgcttggtactgtttcttttgtcgatgctcaccctgttgtttggtgttacttctgcaggatcctctaagtagcagccatgaacaagaacaacaccaagctgagcacccgcgccctgccgagcttcatcgactacttcaacggcatctacggcttcgccaccggcatcaaggacatcatgaacatgatcttcaagaccgacaccggcggcgacctgaccctggacgagatcctgaagaaccagcagctgctgaacgacatcagcggcaagctggacggcgtgaacggcagcctgaacgacctgatcgcccagggcaacctgaacaccgagctgagcaaggagatccttaagatcgccaacgagcagaaccaggtgctgaacgacgtgaacaacaagctggacgccatcaacaccatgctgcgcgtgtacctgccgaagatcaccagcatgctgagcgacgtgattaagcagaactacgccctgagcctgcagatcgagtacctgagcaagcagctgcaggagatcagcgacaagctggacatcatcaacgtgaacgtcctgatcaacagcaccctgaccgagatcaccccggcctaccagcgcatcaagtacgtgaacgagaagttcgaagagctgaccttcgccaccgagaccagcagcaaggtgaagaaggacggcagcccggccgacatcctggacgagctgaccgagctgaccgagctggcgaagagcgtgaccaagaacgacgtggacggcttcgagttctacctgaacaccttccacgacgtgatggtgggcaacaacctgttcggccgcagcgccctgaagaccgccagcgagctgatcaccaaggagaacgtgaagaccagcggcagcgaggtgggcaacgtgtacaacttcctgatcgtgctgaccgccctgcaggcccaggccttcctgaccctgaccacctgtcgcaagctgctgggcctggccgacatcgactacaccagcatcatgaacgagcacttgaacaaggagaaggaggagttccgcgtgaacatcctgccgaccctgagcaacaccttcagcaacccgaactacgccaaggtgaagggcagcgacgaggacgccaagatgatcgtggaggctaagccgggccacgcgttgatcggcttcgagatcagcaacgacagcatcaccgtgctgaaggtgtacgaggccaagctgaagcagaactaccaggtggacaaggacagcttgagcgaggtgatctacggcgacatggacaagctgctgtgtccggaccagagcgagcaaatctactacaccaacaacatcgtgttcccgaacgagtacgtgatcaccaagatcgacttcaccaagaagatgaagaccctgcgctacgaggtgaccgccaacttctacgacagcagcaccggcgagatcgacctgaacaagaagaaggtggagagcagcgaggccgagtaccgcaccctgagcgcgaacgacgacggcgtctacatgccactgggcgtgatcagcgagaccttcctgaccccgatcaacggctttggcctgcaggccgacgagaacagccgcctgatcaccctgacctgtaagagctacctgcgcgagctgctgctagccaccgacctgagcaacaaggagaccaagctgatcgtgccaccgagcggcttcatcagcaacatcgtggagaacggcagcatcgaggaggacaacctggagccgtggaaggccaacaacaagaacgcctacgtcgaccacaccggcggcgtgaacggcaccaaggccctgtacgtgcacaaggacggcggcatcagccagttcatcggcgacaagctgaagccgaagaccgagtacgtgatccagtacaccgtgaagggcaagccatcgattcacctgaaggacgagaacaccggctacatccactacgaggacaccaacaacaacctggaggactaccagaccatcaacaagcgcttcaccaccggcaccgacctgaagggcgtgtacctgatcctgaagagccagaacggcgacgaggcctggggcgacaacttcatcatcctggagatcagcccgagcgagaagctgctgagcccggagctgatcaacaccaacaactggaccagcaccggcagcaccaacatcagcggcaacaccctgaccctgtaccagggcggccgcggcatcctgaagcagaacctgcagctggacagcttcagcacctaccgcgtgtacttcagcgtgagcggcgacgccaacgtgcgcatccgcaactcccgcgaggtgctgttcgagaagaggtacatgagcggcgccaaggacgtgagcgagatgttcaccaccaagttcgagaaggacaacttctacatcgagctgagccagggcaacaacctgtacggcggcccgatcgtgcacttctacgacgtgagcatcaagtaggagctctatacgcacacacatgttgagatattagaggaaactgaagaattacgccacattatctgcacaaagtggagtagtcagtcatcgatcaggaaccagacaccagacttttattcatacagtgaagtgaagtgaagtgcagtgcagtgagttgctggtttttgtacaacttagtatgtatttgtatttgtaaaatacttctatcaataaaatttctaattcctaaaaccaaaatccag

SEQ ID NO: 88 - DNA, 4635 bp, Artificial Sequence
  23713 vip3 expression cassette
ctgcagtgcagcgtgacccggtcgtgcccctctctagagataatgagcattgcatgtctaagttataaaaaattaccacatattttttttgtcacacttgtttgaagtgcagtttatctatctttatacatatatttaaactttactctacgaataatataatctatagtactacaataatatcagtgttttagagaatcatataaatgaacagttagacatggtctaaaggacaattgagtattttgacaacaggactctacagttttatctttttagtgtgcatgtgttctcctttttttttgcaaatagcttcacctatataatacttcatccattttattagtacatccatttagggtttagggttaatggtttttatagactaatttttttagtacatctattttattctattttagcctctaaattaagaaaactaaaactctattttagtttttttatttaataatttagatataaaatagaataaaataaagtgactaaaaattaaacaaataccctttaagaaattaaaaaaactaaggaaacatttttcttgtttcgagtagataatgccagcctgttaaacgccgtcgacgagtctaacggacaccaaccagcgaaccagcagcgtcgcgtcgggccaagcgaagcagacggcacggcatctctgtcgctgcctctggacccctctcgagagttccgctccaccgttggacttgctccgctgtcggcatccagaaattgcgtggcggagcggcagacgtgagccggcacggcaggcggcctcctcctcctctcacggcaccggcagctacgggggattcctttcccaccgctccttcgctttcccttcctcgcccgccgtaataaatagacaccccctccacaccctctttccccaacctcgtgttgttcggagcgcacacacacacaaccagatctcccccaaatccacccgtcggcacctccgcttcctagtatacgcacacacatgttgagatattagaggaaactgaagaattacgccacactaggtacgccgctcgtcctccccccccccccctctctaccttctctagatcggcgttccggtccatagttagggcccggtagttctacttctgttcatgtttgtgttagatccgtgtttgtgttagatccgtgctgctagcgttcgtacacggatgcgacctgtacgtcagacacgttctgattgctaacttgccagtgtttctctttggggaatcctgggatggctctagccgttccgcagacgggatcgatttcatgattttttttgtttcgttgcatagggtttggtttgcccttttcctttatttcaatatatgccgtgcacttgtttgtcgggtcatcttttcatgcttttttttgtcttggttgtgatgatgtggtctggttgggcggtcgttctagatcggagtagaattctgtttcaaactacctggtggatttattaattttggatctgtatgtgtgtgccatacatattcatagttacgaattgaagatgatggatggaaatatcgatctaggataggtatacatgttgatgcgggttttactgatgcatatacagagatgctttttgttcgcttggttgtgatgatgtggtgtggttgggcggtcgttcattcgttctagatcggagtagaatactgtttcaaactacctggtgtatttattaattttggaactgtatgtgtgtgtcatacatcttcatagttacgagtttaagatggatggaaatatcgatctaggataggtatacatgttgatgtgggttttactgatgcatatacatgatggcatatgcagcatctattcatatgctctaaccttgagtacctatctattataataaacaagtatgttttataattattttgatcttgatatacttggatgatggcatatccagcagctatatgtggatttttttagccctgccttcatacgctatttatttgcttggtactgtttcttttgtcgatgctcaccctgttgtttggtgttacttctgcaggatcctctaagtagcagccatgaacaagaacaacaccaagctgagcacccgcgccctgccgagcttcatcgactacttcaacggcatctacggcttcgccaccggcatcaaggacatcatgaacatgatcttcaagaccgacaccggcggcgacctgaccctggacgagatcctgaagaaccagcagctgctgaacgacatcagcggcaagctggacggcgtgaacggcagcctgaacgacctgatcgcccagggcaacctgaacaccgagctgagcaaggagatccttaagatcgccaacgagcagaaccaggtgctgaacgacgtgaacaacaagctggacgccatcaacaccatgctgcgcgtgtacctgccgaagatcaccagcatgctgagcgacgtgattaagcagaactacgccctgagcctgcagatcgagtacctgagcaagcagctgcaggagatcagcgacaagctggacatcatcaacgtgaacgtcctgatcaacagcaccctgaccgagatcaccccggcctaccagcgcatcaagtacgtgaacgagaagttcgaagagctgaccttcgccaccgagaccagcagcaaggtgaagaaggacggcagcccggccgacatcctggacgagctgaccgagctgaccgagctggcgaagagcgtgaccaagaacgacgtggacggcttcgagttctacctgaacaccttccacgacgtgatggtgggcaacaacctgttcggccgcagcgccctgaagaccgccagcgagctgatcaccaaggagaacgtgaagaccagcggcagcgaggtgggcaacgtgtacaacttcctgatcgtgctgaccgccctgcaggcccaggccttcctgaccctgaccacctgtcgcaagctgctgggcctggccgacatcgactacaccagcatcatgaacgagcacttgaacaaggagaaggaggagttccgcgtgaacatcctgccgaccctgagcaacaccttcagcaacccgaactacgccaaggtgaagggcagcgacgaggacgccaagatgatcgtggaggctaagccgggccacgcgttgatcggcttcgagatcagcaacgacagcatcaccgtgctgaaggtgtacgaggccaagctgaagcagaactaccaggtggacaaggacagcttgagcgaggtgatctacggcgacatggacaagctgctgtgtccggaccagagcgagcaaatctactacaccaacaacatcgtgttcccgaacgagtacgtgatcaccaagatcgacttcaccaagaagatgaagaccctgcgctacgaggtgaccgccaacttctacgacagcagcaccggcgagatcgacctgaacaagaagaaggtggagagcagcgaggccgagtaccgcaccctgagcgcgaacgacgacggcgtctacatgccactgggcgtgatcagcgagaccttcctgaccccgatcaacggctttggcctgcaggccgacgagaacagccgcctgatcaccctgacctgtaagagctacctgcgcgagctgctgctagccaccgacctgagcaacaaggagaccaagctgatcgtgccaccgagcggcttcatcagcaacatcgtggagaacggcagcatcgaggaggacaacctggagccgtggaaggccaacaacaagaacgcctacgtcgaccacaccggcggcgtgaacggcaccaaggccctgtacgtgcacaaggacggcggcatcagccagttcatcggcgacaagctgaagccgaagaccgagtacgtgatccagtacaccgtgaagggcaagccatcgattcacctgaaggacgagaacaccggctacatccactacgaggacaccaacaacaacctggaggactaccagaccatcaacaagcgcttcaccaccggcaccgacctgaagggcgtgtacctgatcctgaagagccagaacggcgacgaggcctggggcgacaacttcatcatcctggagatcagcccgagcgagaagctgctgagcccggagctgatcaacaccaacaactggaccagcaccggcagcaccaacatcagcggcaacaccctgaccctgtaccagggcggccgcggcatcctgaagcagaacctgcagctggacagcttcagcacctaccgcgtgtacttcagcgtgagcggcgacgccaacgtgcgcatccgcaactcccgcgaggtgctgttcgagaagaggtacatgagcggcgccaaggacgtgagcgagatgttcaccaccaagttcgagaaggacaacttctacatcgagctgagccagggcaacaacctgtacggcggcccgatcgtgcacttctacgacgtgagcatcaagtaggagctctagatcttatctgcacaaagtggagtagtcagtcatcgatcaggaaccagacaccagacttttattcatacagtgaagtgaagtgaagtgcagtgcagtgagttgctggtttttgtacaacttagtatgtatttgtatttgtaaaatacttctatcaataaaatttctaattcctaaaaccaaaatccag

SEQ ID NO: 89 - DNA, 6625 bp, Artificial Sequence
  23714 vip3 expression cassette
ctgcagtgcagcgtgacccggtcgtgcccctctctagagataatgagcattgcatgtctaagttataaaaaattaccacatattttttttgtcacacttgtttgaagtgcagtttatctatctttatacatatatttaaactttactctacgaataatataatctatagtactacaataatatcagtgttttagagaatcatataaatgaacagttagacatggtctaaaggacaattgagtattttgacaacaggactctacagttttatctttttagtgtgcatgtgttctcctttttttttgcaaatagcttcacctatataatacttcatccattttattagtacatccatttagggtttagggttaatggtttttatagactaatttttttagtacatctattttattctattttagcctctaaattaagaaaactaaaactctattttagtttttttatttaataatttagatataaaatagaataaaataaagtgactaaaaattaaacaaataccctttaagaaattaaaaaaactaaggaaacatttttcttgtttcgagtagataatgccagcctgttaaacgccgtcgacgagtctaacggacaccaaccagcgaaccagcagcgtcgcgtcgggccaagcgaagcagacggcacggcatctctgtcgctgcctctggacccctctcgagagttccgctccaccgttggacttgctccgctgtcggcatccagaaattgcgtggcggagcggcagacgtgagccggcacggcaggcggcctcctcctcctctcacggcaccggcagctacgggggattcctttcccaccgctccttcgctttcccttcctcgcccgccgtaataaatagacaccccctccacaccctctttccccaacctcgtgttgttcggagcgcacacacacacaaccagatctcccccaaatccacccgtcggcacctccgcttcctaggtacgccgctcgtcctccccccccccccctctctaccttctctagatcggcgttccggtccatagttagggcccggtagttctacttctgttcatgtttgtgttagatccgtgtttgtgttagatccgtgctgctagcgttcgtacacggatgcgacctgtacgtcagacacgttctgattgctaacttgccagtgtttctctttggggaatcctgggatggctctagccgttccgcagacgggatcgatttcatgattttttttgtttcgttgcatagggtttggtttgcccttttcctttatttcaatatatgccgtgcacttgtttgtcgggtcatcttttcatgcttttttttgtcttggttgtgatgatgtggtctggttgggcggtcgttctagatcggagtagaattctgtttcaaactacctggtggatttattaattttggatctgtatgtgtgtgccatacatattcatagttacgaattgaagatgatggatggaaatatcgatctaggataggtatacatgttgatgcgggttttactgatgcatatacagagatgctttttgttcgcttggttgtgatgatgtggtgtggttgggcggtcgttcattcgttctagatcggagtagaatactgtttcaaactacctggtgtatttattaattttggaactgtatgtgtgtgtcatacatcttcatagttacgagtttaagatggatggaaatatcgatctaggataggtatacatgttgatgtgggttttactgatgcatatacatgatggcatatgcagcatctattcatatgctctaaccttgagtacctatctattataataaacaagtatgttttataattattttgatcttgatatacttggatgatggcatatccagcagctatatgtggatttttttagccctgccttcatacgctatttatttgcttggtactgtttcttttgtcgatgctcaccctgttgtttggtgttacttctgcaggatcctctaagtagcagccatgaacaagaacaacaccaagctgagcacccgcgccctgccgagcttcatcgactacttcaacggcatctacggcttcgccaccggcatcaaggacatcatgaacatgatcttcaagaccgacaccggcggcgacctgaccctggacgagatcctgaagaaccagcagctgctgaacgacatcagcggcaagctggacggcgtgaacggcagcctgaacgacctgatcgcccagggcaacctgaacaccgagctgagcaaggagatccttaagatcgccaacgagcagaaccaggtgctgaacgacgtgaacaacaagctggacgccatcaacaccatgctgcgcgtgtacctgccgaagatcaccagcatgctgagcgacgtgattaagcagaactacgccctgagcctgcagatcgagtacctgagcaagcagctgcaggagatcagcgacaagctggacatcatcaacgtgaacgtcctgatcaacagcaccctgaccgagatcaccccggcctaccagcgcatcaagtacgtgaacgagaagttcgaagagctgaccttcgccaccgagaccagcagcaaggtgaagaaggacggcagcccggccgacatcctggacgagctgaccgagctgaccgagctggcgaagagcgtgaccaagaacgacgtggacggcttcgagttctacctgaacaccttccacgacgtgatggtgggcaacaacctgttcggccgcagcgccctgaagaccgccagcgagctgatcaccaaggagaacgtgaagaccagcggcagcgaggtgggcaacgtgtacaacttcctgatcgtgctgaccgccctgcaggcccaggccttcctgaccctgaccacctgtcgcaagctgctgggcctggccgacatcgactacaccagcatcatgaacgagcacttgaacaaggagaaggaggagttccgcgtgaacatcctgccgaccctgagcaacaccttcagcaacccgaactacgccaaggtgaagggcagcgacgaggacgccaagatgatcgtggaggctaagccgggccacgcgttgatcggcttcgagatcagcaacgacagcatcaccgtgctgaaggtgtacgaggccaagctgaagcagaactaccaggtggacaaggacagcttgagcgaggtgatctacggcgacatggacaagctgctgtgtccggaccagagcgagcaaatctactacaccaacaacatcgtgttcccgaacgagtacgtgatcaccaagatcgacttcaccaagaagatgaagaccctgcgctacgaggtgaccgccaacttctacgacagcagcaccggcgagatcgacctgaacaagaagaaggtggagagcagcgaggccgagtaccgcaccctgagcgcgaacgacgacggcgtctacatgccactgggcgtgatcagcgagaccttcctgaccccgatcaacggctttggcctgcaggccgacgagaacagccgcctgatcaccctgacctgtaagagctacctgcgcgagctgctgctagccaccgacctgagcaacaaggagaccaagctgatcgtgccaccgagcggcttcatcagcaacatcgtggagaacggcagcatcgaggaggacaacctggagccgtggaaggccaacaacaagaacgcctacgtcgaccacaccggcggcgtgaacggcaccaaggccctgtacgtgcacaaggacggcggcatcagccagttcatcggcgacaagctgaagccgaagaccgagtacgtgatccagtacaccgtgaagggcaagccatcgattcacctgaaggacgagaacaccggctacatccactacgaggacaccaacaacaacctggaggactaccagaccatcaacaagcgcttcaccaccggcaccgacctgaagggcgtgtacctgatcctgaagagccagaacggcgacgaggcctggggcgacaacttcatcatcctggagatcagcccgagcgagaagctgctgagcccggagctgatcaacaccaacaactggaccagcaccggcagcaccaacatcagcggcaacaccctgaccctgtaccagggcggccgcggcatcctgaagcagaacctgcagctggacagcttcagcacctaccgcgtgtacttcagcgtgagcggcgacgccaacgtgcgcatccgcaactcccgcgaggtgctgttcgagaagaggtacatgagcggcgccaaggacgtgagcgagatgttcaccaccaagttcgagaaggacaacttctacatcgagctgagccagggcaacaacctgtacggcggcccgatcgtgcacttctacgacgtgagcatcaagtaggagctctatacgcacacacatgttgagatattagaggaaactgaagaattacgccacattatctgcacaaagtggagtagtcagtcatcgatcaggaaccagacaccagacttttattcatacagtgaagtgaagtgaagtgcagtgcagtgagttgctggtttttgtacaacttagtatgtatttgtatttgtaaaatacttctatcaataaaatttctaattcctaaaaccaaaatccaggctacacggaccgcgatcgctgacgaggctgatataatttagggctggttcggttaggggtggattgagaaggattgaaggggattaaatatcctcctattgaaatttgaataggtccaatccacatcaatctatctcaaactgaataaggctttagggctgatttgttgatcaaggatcacgagagattgaaatcccctccaacaccctgtgatcctcttgtcaccaaatcaatctagggagtgtttggctcccaccaccaccttctagactaaaattttagtcttttagtttgtaaactactaaacagtatgactaagattctgtttggaggcaattaaatttttaagaaactgattttttttatcttttagttaggaggggctagcttcttggtttttaagaaactatgaatcaaatttttataaactgaggcataaactgatatgtttgaaacaacctcaatttccataaacaatttttaaaaaaattgggcaaataggctctaaatgtagtctcacaaatataaattttagggactaaagtgtagttcttaaagtttagaaggatgactaaagaaacaagaattccccatgctcgatttttttttacagagaaaaaacatttttttaagtttaaccaagtatatagaaaatgttttatatctaaataagttcattctgaaagtatactccactatcattctaacgataattactacgcatcgttatttcctaatataaattagagtgcagtgactttgtaacaccgtggagtgatgaactatttctcaaagtttggtcatggtgaactgaactaaaaagccagagcagctagctccacgcgagtgccagaacaaggcgccgtgcttttgcagcttttcaacaagggtcaagggggcagcaaggcatactctgtgtgatttgtgaagggcagcagcccgggtaggtgtaactgaaaaacagatgctgctgctgctctcctgagtcctgaactcccaacggtgcctgccttctctaggaggcctataaatttgggtcgagcagcagagcaacgccttcacagccaatgcagggtagcttctcacctccaaacagctagtctctgttcttacccattccaccctgttacgaaaagctagaaaagtgtcaggcactgaaagtgagagttggaggaaagcaaaccggctgggtatcggattcagcaacggagggtgctgccggtcggtttgttttcctccaatatctcaccttcagtcgatagtctgatgaagatgtacactaccaacatccattcatttgtgccatctgaagtgaggattagaggcaactgaaccatcatctattgcaaaggttcagtttcctctaatatctcatctcgaatgggcccatcgccggagatgtttgtttgcatatagctgaaaatgcagtcacccaaagtgagtgctgaaaggaatttctaacacctaggttgaattgagtgatactgaagtgtttggccatctgctagtactaaccactagtcaaacagatggcaatccacgttgtcatcgagttggctgaacagatttgctcggaaaggtatacattctccatttgggacatgtgtgggagccaggggatggagcagattggaggggattttagcctctcgaatcccctccatttcgctggctcctaaacaagccgcccttgaagtgctgatttgaggtaagtaaaccgaccggagaagcagggacaaagaagtatcgtttcatcagatgtgatgcaccaacttctaccgttattttgacaaagcactgcatgtaaatctgcagtggtttatccaatagcaaacttgttctctactttgtcactgtactaactgaaactgacgaacatccccacttgtattacaattttatctcgatctgcagggtaagacagctttcgcgtgtatacacacaagtcgagaaaacccctcattcgtatgcattaacttgagagctagaaatctagaat

SEQ ID NO: 90 - DNA, 4625 bp, Artificial Sequence
  23715 vip3 expression cassette
ctgcagtgcagcgtgacccggtcgtgcccctctctagagataatgagcattgcatgtctaagttataaaaaattaccacatattttttttgtcacacttgtttgaagtgcagtttatctatctttatacatatatttaaactttactctacgaataatataatctatagtactacaataatatcagtgttttagagaatcatataaatgaacagttagacatggtctaaaggacaattgagtattttgacaacaggactctacagttttatctttttagtgtgcatgtgttctcctttttttttgcaaatagcttcacctatataatacttcatccattttattagtacatccatttagggtttagggttaatggtttttatagactaatttttttagtacatctattttattctattttagcctctaaattaagaaaactaaaactctattttagtttttttatttaataatttagatataaaatagaataaaataaagtgactaaaaattaaacaaataccctttaagaaattaaaaaaactaaggaaacatttttcttgtttcgagtagataatgccagcctgttaaacgccgtcgacgagtctaacggacaccaaccagcgaaccagcagcgtcgcgtcgggccaagcgaagcagacggcacggcatctctgtcgctgcctctggacccctctcgagagttccgctccaccgttggacttgctccgctgtcggcatccagaaattgcgtggcggagcggcagacgtgagccggcacggcaggcggcctcctcctcctctcacggcaccggcagctacgggggattcctttcccaccgctccttcgctttcccttcctcgcccgccgtaataaatagacaccccctccacaccctctttccccaacctcgtgttgttcggagcgcacacacacacaaccagatctcccccaaatccacccgtcggcacctccgcttcctaggtacgccgctcgtcctccccccccccccctctctaccttctctagatcggcgttccggtccatagttagggcccggtagttctacttctgttcatgtttgtgttagatccgtgtttgtgttagatccgtgctgctagcgttcgtacacggatgcgacctgtacgtcagacacgttctgattgctaacttgccagtgtttctctttggggaatcctgggatggctctagccgttccgcagacgggatcgatttcatgattttttttgtttcgttgcatagggtttggtttgcccttttcctttatttcaatatatgccgtgcacttgtttgtcgggtcatcttttcatgcttttttttgtcttggttgtgatgatgtggtctggttgggcggtcgttctagatcggagtagaattctgtttcaaactacctggtggatttattaattttggatctgtatgtgtgtgccatacatattcatagttacgaattgaagatgatggatggaaatatcgatctaggataggtatacatgttgatgcgggttttactgatgcatatacagagatgctttttgttcgcttggttgtgatgatgtggtgtggttgggcggtcgttcattcgttctagatcggagtagaatactgtttcaaactacctggtgtatttattaattttggaactgtatgtgtgtgtcatacatcttcatagttacgagtttaagatggatggaaatatcgatctaggataggtatacatgttgatgtgggttttactgatgcatatacatgatggcatatgcagcatctattcatatgctctaaccttgagtacctatctattataataaacaagtatgttttataattattttgatcttgatatacttggatgatggcatatccagcagctatatgtggatttttttagccctgccttcatacgctatttatttgcttggtactgtttcttttgtcgatgctcaccctgttgtttggtgttacttctgcaggatcctctaagtagcagccatgaacaagaacaacaccaagctgagcacccgcgccctgccgagcttcatcgactacttcaacggcatctacggcttcgccaccggcatcaaggacatcatgaacatgatcttcaagaccgacaccggcggcgacctgaccctggacgagatcctgaagaaccagcagctgctgaacgacatcagcggcaagctggacggcgtgaacggcagcctgaacgacctgatcgcccagggcaacctgaacaccgagctgagcaaggagatccttaagatcgccaacgagcagaaccaggtgctgaacgacgtgaacaacaagctggacgccatcaacaccatgctgcgcgtgtacctgccgaagatcaccagcatgctgagcgacgtgattaagcagaactacgccctgagcctgcagatcgagtacctgagcaagcagctgcaggagatcagcgacaagctggacatcatcaacgtgaacgtcctgatcaacagcaccctgaccgagatcaccccggcctaccagcgcatcaagtacgtgaacgagaagttcgaagagctgaccttcgccaccgagaccagcagcaaggtgaagaaggacggcagcccggccgacatcctggacgagctgaccgagctgaccgagctggcgaagagcgtgaccaagaacgacgtggacggcttcgagttctacctgaacaccttccacgacgtgatggtgggcaacaacctgttcggccgcagcgccctgaagaccgccagcgagctgatcaccaaggagaacgtgaagaccagcggcagcgaggtgggcaacgtgtacaacttcctgatcgtgctgaccgccctgcaggcccaggccttcctgaccctgaccacctgtcgcaagctgctgggcctggccgacatcgactacaccagcatcatgaacgagcacttgaacaaggagaaggaggagttccgcgtgaacatcctgccgaccctgagcaacaccttcagcaacccgaactacgccaaggtgaagggcagcgacgaggacgccaagatgatcgtggaggctaagccgggccacgcgttgatcggcttcgagatcagcaacgacagcatcaccgtgctgaaggtgtacgaggccaagctgaagcagaactaccaggtggacaaggacagcttgagcgaggtgatctacggcgacatggacaagctgctgtgtccggaccagagcgagcaaatctactacaccaacaacatcgtgttcccgaacgagtacgtgatcaccaagatcgacttcaccaagaagatgaagaccctgcgctacgaggtgaccgccaacttctacgacagcagcaccggcgagatcgacctgaacaagaagaaggtggagagcagcgaggccgagtaccgcaccctgagcgcgaacgacgacggcgtctacatgccactgggcgtgatcagcgagaccttcctgaccccgatcaacggctttggcctgcaggccgacgagaacagccgcctgatcaccctgacctgtaagagctacctgcgcgagctgctgctagccaccgacctgagcaacaaggagaccaagctgatcgtgccaccgagcggcttcatcagcaacatcgtggagaacggcagcatcgaggaggacaacctggagccgtggaaggccaacaacaagaacgcctacgtcgaccacaccggcggcgtgaacggcaccaaggccctgtacgtgcacaaggacggcggcatcagccagttcatcggcgacaagctgaagccgaagaccgagtacgtgatccagtacaccgtgaagggcaagccatcgattcacctgaaggacgagaacaccggctacatccactacgaggacaccaacaacaacctggaggactaccagaccatcaacaagcgcttcaccaccggcaccgacctgaagggcgtgtacctgatcctgaagagccagaacggcgacgaggcctggggcgacaacttcatcatcctggagatcagcccgagcgagaagctgctgagcccggagctgatcaacaccaacaactggaccagcaccggcagcaccaacatcagcggcaacaccctgaccctgtaccagggcggccgcggcatcctgaagcagaacctgcagctggacagcttcagcacctaccgcgtgtacttcagcgtgagcggcgacgccaacgtgcgcatccgcaactcccgcgaggtgctgttcgagaagaggtacatgagcggcgccaaggacgtgagcgagatgttcaccaccaagttcgagaaggacaacttctacatcgagctgagccagggcaacaacctgtacggcggcccgatcgtgcacttctacgacgtgagcatcaagtaggagctccgccaaatgaatcttcttgagattttagagtaaactgaaactgactgttgcattatctgcacaaagtggagtagtcagtcatcgatcaggaaccagacaccagacttttattcatacagtgaagtgaagtgaagtgcagtgcagtgagttgctggtttttgtacaacttagtatgtatttgtatttgtaaaatacttctatcaataaaatttctaattcctaaaaccaaaatccag

SEQ ID NO: 91 - DNA, 4633 bp, Artificial Sequence
  23716 vip3 expression cassette
ctgcagtgcagcgtgacccggtcgtgcccctctctagagataatgagcattgcatgtctaagttataaaaaattaccacatattttttttgtcacacttgtttgaagtgcagtttatctatctttatacatatatttaaactttactctacgaataatataatctatagtactacaataatatcagtgttttagagaatcatataaatgaacagttagacatggtctaaaggacaattgagtattttgacaacaggactctacagttttatctttttagtgtgcatgtgttctcctttttttttgcaaatagcttcacctatataatacttcatccattttattagtacatccatttagggtttagggttaatggtttttatagactaatttttttagtacatctattttattctattttagcctctaaattaagaaaactaaaactctattttagtttttttatttaataatttagatataaaatagaataaaataaagtgactaaaaattaaacaaataccctttaagaaattaaaaaaactaaggaaacatttttcttgtttcgagtagataatgccagcctgttaaacgccgtcgacgagtctaacggacaccaaccagcgaaccagcagcgtcgcgtcgggccaagcgaagcagacggcacggcatctctgtcgctgcctctggacccctctcgagagttccgctccaccgttggacttgctccgctgtcggcatccagaaattgcgtggcggagcggcagacgtgagccggcacggcaggcggcctcctcctcctctcacggcaccggcagctacgggggattcctttcccaccgctccttcgctttcccttcctcgcccgccgtaataaatagacaccccctccacaccctctttccccaacctcgtgttgttcggagcgcacacacacacaaccagatctcccccaaatccacccgtcggcacctccgcttcctaggtacgccgctcgtcctccccccccccccctctctaccttctctagatcggcgttccggtccatagttagggcccggtagttctacttctgttcatgtttgtgttagatccgtgtttgtgttagatccgtgctgctagcgttcgtacacggatgcgacctgtacgtcagacacgttctgattgctaacttgccagtgtttctctttggggaatcctgggatggctctagccgttccgcagacgggatcgatttcatgattttttttgtttcgttgcatagggtttggtttgcccttttcctttatttcaatatatgccgtgcacttgtttgtcgggtcatcttttcatgcttttttttgtcttggttgtgatgatgtggtctggttgggcggtcgttctagatcggagtagaattctgtttcaaactacctggtggatttattaattttggatctgtatgtgtgtgccatacatattcatagttacgaattgaagatgatggatggaaatatcgatctaggataggtatacatgttgatgcgggttttactgatgcatatacagagatgctttttgttcgcttggttgtgatgatgtggtgtggttgggcggtcgttcattcgttctagatcggagtagaatactgtttcaaactacctggtgtatttattaattttggaactgtatgtgtgtgtcatacatcttcatagttacgagtttaagatggatggaaatatcgatctaggataggtatacatgttgatgtgggttttactgatgcatatacatgatggcatatgcagcatctattcatatgctctaaccttgagtacctatctattataataaacaagtatgttttataattattttgatcttgatatacttggatgatggcatatccagcagctatatgtggatttttttagccctgccttcatacgctatttatttgcttggtactgtttcttttgtcgatgctcaccctgttgtttggtgttacttctgcaggatcctctaagtagcagccatgtatacgcacacacatgttgagatattagaggaaactgaagaattacgccacattaacaagaacaacaccaagctgagcacccgcgccctgccgagcttcatcgactacttcaacggcatctacggcttcgccaccggcatcaaggacatcatgaacatgatcttcaagaccgacaccggcggcgacctgaccctggacgagatcctgaagaaccagcagctgctgaacgacatcagcggcaagctggacggcgtgaacggcagcctgaacgacctgatcgcccagggcaacctgaacaccgagctgagcaaggagatccttaagatcgccaacgagcagaaccaggtgctgaacgacgtgaacaacaagctggacgccatcaacaccatgctgcgcgtgtacctgccgaagatcaccagcatgctgagcgacgtgattaagcagaactacgccctgagcctgcagatcgagtacctgagcaagcagctgcaggagatcagcgacaagctggacatcatcaacgtgaacgtcctgatcaacagcaccctgaccgagatcaccccggcctaccagcgcatcaagtacgtgaacgagaagttcgaagagctgaccttcgccaccgagaccagcagcaaggtgaagaaggacggcagcccggccgacatcctggacgagctgaccgagctgaccgagctggcgaagagcgtgaccaagaacgacgtggacggcttcgagttctacctgaacaccttccacgacgtgatggtgggcaacaacctgttcggccgcagcgccctgaagaccgccagcgagctgatcaccaaggagaacgtgaagaccagcggcagcgaggtgggcaacgtgtacaacttcctgatcgtgctgaccgccctgcaggcccaggccttcctgaccctgaccacctgtcgcaagctgctgggcctggccgacatcgactacaccagcatcatgaacgagcacttgaacaaggagaaggaggagttccgcgtgaacatcctgccgaccctgagcaacaccttcagcaacccgaactacgccaaggtgaagggcagcgacgaggacgccaagatgatcgtggaggctaagccgggccacgcgttgatcggcttcgagatcagcaacgacagcatcaccgtgctgaaggtgtacgaggccaagctgaagcagaactaccaggtggacaaggacagcttgagcgaggtgatctacggcgacatggacaagctgctgtgtccggaccagagcgagcaaatctactacaccaacaacatcgtgttcccgaacgagtacgtgatcaccaagatcgacttcaccaagaagatgaagaccctgcgctacgaggtgaccgccaacttctacgacagcagcaccggcgagatcgacctgaacaagaagaaggtggagagcagcgaggccgagtaccgcaccctgagcgcgaacgacgacggcgtctacatgccactgggcgtgatcagcgagaccttcctgaccccgatcaacggctttggcctgcaggccgacgagaacagccgcctgatcaccctgacctgtaagagctacctgcgcgagctgctgctagccaccgacctgagcaacaaggagaccaagctgatcgtgccaccgagcggcttcatcagcaacatcgtggagaacggcagcatcgaggaggacaacctggagccgtggaaggccaacaacaagaacgcctacgtcgaccacaccggcggcgtgaacggcaccaaggccctgtacgtgcacaaggacggcggcatcagccagttcatcggcgacaagctgaagccgaagaccgagtacgtgatccagtacaccgtgaagggcaagccatcgattcacctgaaggacgagaacaccggctacatccactacgaggacaccaacaacaacctggaggactaccagaccatcaacaagcgcttcaccaccggcaccgacctgaagggcgtgtacctgatcctgaagagccagaacggcgacgaggcctggggcgacaacttcatcatcctggagatcagcccgagcgagaagctgctgagcccggagctgatcaacaccaacaactggaccagcaccggcagcaccaacatcagcggcaacaccctgaccctgtaccagggcggccgcggcatcctgaagcagaacctgcagctggacagcttcagcacctaccgcgtgtacttcagcgtgagcggcgacgccaacgtgcgcatccgcaactcccgcgaggtgctgttcgagaagaggtacatgagcggcgccaaggacgtgagcgagatgttcaccaccaagttcgagaaggacaacttctacatcgagctgagccagggcaacaacctgtacggcggcccgatcgtgcacttctacgacgtgagcatcaagtaggagctctagatcttatctgcacaaagtggagtagtcagtcatcgatcaggaaccagacaccagacttttattcatacagtgaagtgaagtgaagtgcagtgcagtgagttgctggtttttgtacaacttagtatgtatttgtatttgtaaaatacttctatcaataaaatttctaattcctaaaaccaaaatccag

SEQ ID NO: 92 - DNA, 4603 bp, Artificial Sequence
  23717 vip3 expression cassette
ctgcagtgcagcgtgacccggtcgtgcccctctctagagataatgagcattgcatgtctaagttataaaaaattaccacatattttttttgtcacacttgtttgaagtgcagtttatctatctttatacatatatttaaactttactctacgaataatataatctatagtactacaataatatcagtgttttagagaatcatataaatgaacagttagacatggtctaaaggacaattgagtattttgacaacaggactctacagttttatctttttagtgtgcatgtgttctcctttttttttgcaaatagcttcacctatataatacttcatccattttattagtacatccatttagggtttagggttaatggtttttatagactaatttttttagtacatctattttattctattttagcctctaaattaagaaaactaaaactctattttagtttttttatttaataatttagatataaaatagaataaaataaagtgactaaaaattaaacaaataccctttaagaaattaaaaaaactaaggaaacatttttcttgtttcgagtagataatgccagcctgttaaacgccgtcgacgagtctaacggacaccaaccagcgaaccagcagcgtcgcgtcgggccaagcgaagcagacggcacggcatctctgtcgctgcctctggacccctctcgagagttccgctccaccgttggacttgctccgctgtcggcatccagaaattgcgtggcggagcggcagacgtgagccggcacggcaggcggcctcctcctcctctcacggcaccggcagctacgggggattcctttcccaccgctccttcgctttcccttcctcgcccgccgtaataaatagacaccccctccacaccctctttccccaacctcgtgttgttcggagcgcacacacacacaaccagatctcccccaaatccacccgtcggcacctccgcttcctaggtacgccgctcgtcctccccccccccccctctctaccttctctagatcggcgttccggtccatagttagggcccggtagttctacttctgttcatgtttgtgttagatccgtgtttgtgttagatccgtgctgctagcgttcgtacacggatgcgacctgtacgtcagacacgttctgattgctaacttgccagtgtttctctttggggaatcctgggatggctctagccgttccgcagacgggatcgatttcatgattttttttgtttcgttgcatagggtttggtttgcccttttcctttatttcaatatatgccgtgcacttgtttgtcgggtcatcttttcatgcttttttttgtcttggttgtgatgatgtggtctggttgggcggtcgttctagatcggagtagaattctgtttcaaactacctggtggatttattaattttggatctgtatgtgtgtgccatacatattcatagttacgaattgaagatgatggatggaaatatcgatctaggataggtatacatgttgatgcgggttttactgatgcatatacagagatgctttttgttcgcttggttgtgatgatgtggtgtggttgggcggtcgttcattcgttctagatcggagtagaatactgtttcaaactacctggtgtatttattaattttggaactgtatgtgtgtgtcatacatcttcatagttacgagtttaagatggatggaaatatcgatctaggataggtatacatgttgatgtgggttttactgatgcatatacatgatggcatatgcagcatctattcatatgctctaaccttgagtacctatctattataataaacaagtatgttttataattattttgatcttgatatacttggatgatggcatatccagcagctatatgtggatttttttagccctgccttcatacgctatttatttgcttggtactgtttcttttgtcgatgctcaccctgttgtttggtgttacttctgcaggatcctctaagtagcagccatggctgagatattagaggaaactgaaaacaagaacaacaccaagctgagcacccgcgccctgccgagcttcatcgactacttcaacggcatctacggcttcgccaccggcatcaaggacatcatgaacatgatcttcaagaccgacaccggcggcgacctgaccctggacgagatcctgaagaaccagcagctgctgaacgacatcagcggcaagctggacggcgtgaacggcagcctgaacgacctgatcgcccagggcaacctgaacaccgagctgagcaaggagatccttaagatcgccaacgagcagaaccaggtgctgaacgacgtgaacaacaagctggacgccatcaacaccatgctgcgcgtgtacctgccgaagatcaccagcatgctgagcgacgtgattaagcagaactacgccctgagcctgcagatcgagtacctgagcaagcagctgcaggagatcagcgacaagctggacatcatcaacgtgaacgtcctgatcaacagcaccctgaccgagatcaccccggcctaccagcgcatcaagtacgtgaacgagaagttcgaagagctgaccttcgccaccgagaccagcagcaaggtgaagaaggacggcagcccggccgacatcctggacgagctgaccgagctgaccgagctggcgaagagcgtgaccaagaacgacgtggacggcttcgagttctacctgaacaccttccacgacgtgatggtgggcaacaacctgttcggccgcagcgccctgaagaccgccagcgagctgatcaccaaggagaacgtgaagaccagcggcagcgaggtgggcaacgtgtacaacttcctgatcgtgctgaccgccctgcaggcccaggccttcctgaccctgaccacctgtcgcaagctgctgggcctggccgacatcgactacaccagcatcatgaacgagcacttgaacaaggagaaggaggagttccgcgtgaacatcctgccgaccctgagcaacaccttcagcaacccgaactacgccaaggtgaagggcagcgacgaggacgccaagatgatcgtggaggctaagccgggccacgcgttgatcggcttcgagatcagcaacgacagcatcaccgtgctgaaggtgtacgaggccaagctgaagcagaactaccaggtggacaaggacagcttgagcgaggtgatctacggcgacatggacaagctgctgtgtccggaccagagcgagcaaatctactacaccaacaacatcgtgttcccgaacgagtacgtgatcaccaagatcgacttcaccaagaagatgaagaccctgcgctacgaggtgaccgccaacttctacgacagcagcaccggcgagatcgacctgaacaagaagaaggtggagagcagcgaggccgagtaccgcaccctgagcgcgaacgacgacggcgtctacatgccactgggcgtgatcagcgagaccttcctgaccccgatcaacggctttggcctgcaggccgacgagaacagccgcctgatcaccctgacctgtaagagctacctgcgcgagctgctgctagccaccgacctgagcaacaaggagaccaagctgatcgtgccaccgagcggcttcatcagcaacatcgtggagaacggcagcatcgaggaggacaacctggagccgtggaaggccaacaacaagaacgcctacgtcgaccacaccggcggcgtgaacggcaccaaggccctgtacgtgcacaaggacggcggcatcagccagttcatcggcgacaagctgaagccgaagaccgagtacgtgatccagtacaccgtgaagggcaagccatcgattcacctgaaggacgagaacaccggctacatccactacgaggacaccaacaacaacctggaggactaccagaccatcaacaagcgcttcaccaccggcaccgacctgaagggcgtgtacctgatcctgaagagccagaacggcgacgaggcctggggcgacaacttcatcatcctggagatcagcccgagcgagaagctgctgagcccggagctgatcaacaccaacaactggaccagcaccggcagcaccaacatcagcggcaacaccctgaccctgtaccagggcggccgcggcatcctgaagcagaacctgcagctggacagcttcagcacctaccgcgtgtacttcagcgtgagcggcgacgccaacgtgcgcatccgcaactcccgcgaggtgctgttcgagaagaggtacatgagcggcgccaaggacgtgagcgagatgttcaccaccaagttcgagaaggacaacttctacatcgagctgagccagggcaacaacctgtacggcggcccgatcgtgcacttctacgacgtgagcatcaagtaggagctctagatcttatctgcacaaagtggagtagtcagtcatcgatcaggaaccagacaccagacttttattcatacagtgaagtgaagtgaagtgcagtgcagtgagttgctggtttttgtacaacttagtatgtatttgtatttgtaaaatacttctatcaataaaatttctaattcctaaaaccaaaatccag

SEQ ID NO: 93 - DNA, 4591 bp, Artificial Sequence
  23718 vip3 expression cassette
ctgcagtgcagcgtgacccggtcgtgcccctctctagagataatgagcattgcatgtctaagttataaaaaattaccacatattttttttgtcacacttgtttgaagtgcagtttatctatctttatacatatatttaaactttactctacgaataatataatctatagtactacaataatatcagtgttttagagaatcatataaatgaacagttagacatggtctaaaggacaattgagtattttgacaacaggactctacagttttatctttttagtgtgcatgtgttctcctttttttttgcaaatagcttcacctatataatacttcatccattttattagtacatccatttagggtttagggttaatggtttttatagactaatttttttagtacatctattttattctattttagcctctaaattaagaaaactaaaactctattttagtttttttatttaataatttagatataaaatagaataaaataaagtgactaaaaattaaacaaataccctttaagaaattaaaaaaactaaggaaacatttttcttgtttcgagtagataatgccagcctgttaaacgccgtcgacgagtctaacggacaccaaccagcgaaccagcagcgtcgcgtcgggccaagcgaagcagacggcacggcatctctgtcgctgcctctggacccctctcgagagttccgctccaccgttggacttgctccgctgtcggcatccagaaattgcgtggcggagcggcagacgtgagccggcacggcaggcggcctcctcctcctctcacggcaccggcagctacgggggattcctttcccaccgctccttcgctttcccttcctcgcccgccgtaataaatagacaccccctccacaccctctttccccaacctcgtgttgttcggagcgcacacacacacaaccagatctcccccaaatccacccgtcggcacctccgcttcctaggtacgccgctcgtcctccccccccccccctctctaccttctctagatcggcgttccggtccatagttagggcccggtagttctacttctgttcatgtttgtgttagatccgtgtttgtgttagatccgtgctgctagcgttcgtacacggatgcgacctgtacgtcagacacgttctgattgctaacttgccagtgtttctctttggggaatcctgggatggctctagccgttccgcagacgggatcgatttcatgattttttttgtttcgttgcatagggtttggtttgcccttttcctttatttcaatatatgccgtgcacttgtttgtcgggtcatcttttcatgcttttttttgtcttggttgtgatgatgtggtctggttgggcggtcgttctagatcggagtagaattctgtttcaaactacctggtggatttattaattttggatctgtatgtgtgtgccatacatattcatagttacgaattgaagatgatggatggaaatatcgatctaggataggtatacatgttgatgcgggttttactgatgcatatacagagatgctttttgttcgcttggttgtgatgatgtggtgtggttgggcggtcgttcattcgttctagatcggagtagaatactgtttcaaactacctggtgtatttattaattttggaactgtatgtgtgtgtcatacatcttcatagttacgagtttaagatggatggaaatatcgatctaggataggtatacatgttgatgtgggttttactgatgcatatacatgatggcatatgcagcatctattcatatgctctaaccttgagtacctatctattataataaacaagtatgttttataattattttgatcttgatatacttggatgatggcatatccagcagctatatgtggatttttttagccctgccttcatacgctatttatttgcttggtactgtttcttttgtcgatgctcaccctgttgtttggtgttacttctgcaggatcctctaagtagcagccatgaacaagaacaacaccaagctgagcacccgcgccctgccgagcttcatcgactacttcaacggcatctacggcttcgccaccggcatcaaggacatcatgaacatgatcttcaagaccgacaccggcggcgacctgaccctggacgagatcctgaagaaccagcagctgctgaacgacatcagcggcaagctggacggcgtgaacggcagcctgaacgacctgatcgcccagggcaacctgaacaccgagctgagcaaggagatccttaagatcgccaacgagcagaaccaggtgctgaacgacgtgaacaacaagctggacgccatcaacaccatgctgcgcgtgtacctgccgaagatcaccagcatgctgagcgacgtgattaagcagaactacgccctgagcctgcagatcgagtacctgagcaagcagctgcaggagatcagcgacaagctggacatcatcaacgtgaacgtcctgatcaacagcaccctgaccgagatcaccccggcctaccagcgcatcaagtacgtgaacgagaagttcgaagagctgaccttcgccaccgagaccagcagcgctgagatattagaggaaactgaagacggcagcccggccgacatcctggacgagctgaccgagctgaccgagctggcgaagagcgtgaccaagaacgacgtggacggcttcgagttctacctgaacaccttccacgacgtgatggtgggcaacaacctgttcggccgcagcgccctgaagaccgccagcgagctgatcaccaaggagaacgtgaagaccagcggcagcgaggtgggcaacgtgtacaacttcctgatcgtgctgaccgccctgcaggcccaggccttcctgaccctgaccacctgtcgcaagctgctgggcctggccgacatcgactacaccagcatcatgaacgagcacttgaacaaggagaaggaggagttccgcgtgaacatcctgccgaccctgagcaacaccttcagcaacccgaactacgccaaggtgaagggcagcgacgaggacgccaagatgatcgtggaggctaagccgggccacgcgttgatcggcttcgagatcagcaacgacagcatcaccgtgctgaaggtgtacgaggccaagctgaagcagaactaccaggtggacaaggacagcttgagcgaggtgatctacggcgacatggacaagctgctgtgtccggaccagagcgagcaaatctactacaccaacaacatcgtgttcccgaacgagtacgtgatcaccaagatcgacttcaccaagaagatgaagaccctgcgctacgaggtgaccgccaacttctacgacagcagcaccggcgagatcgacctgaacaagaagaaggtggagagcagcgaggccgagtaccgcaccctgagcgcgaacgacgacggcgtctacatgccactgggcgtgatcagcgagaccttcctgaccccgatcaacggctttggcctgcaggccgacgagaacagccgcctgatcaccctgacctgtaagagctacctgcgcgagctgctgctagccaccgacctgagcaacaaggagaccaagctgatcgtgccaccgagcggcttcatcagcaacatcgtggagaacggcagcatcgaggaggacaacctggagccgtggaaggccaacaacaagaacgcctacgtcgaccacaccggcggcgtgaacggcaccaaggccctgtacgtgcacaaggacggcggcatcagccagttcatcggcgacaagctgaagccgaagaccgagtacgtgatccagtacaccgtgaagggcaagccatcgattcacctgaaggacgagaacaccggctacatccactacgaggacaccaacaacaacctggaggactaccagaccatcaacaagcgcttcaccaccggcaccgacctgaagggcgtgtacctgatcctgaagagccagaacggcgacgaggcctggggcgacaacttcatcatcctggagatcagcccgagcgagaagctgctgagcccggagctgatcaacaccaacaactggaccagcaccggcagcaccaacatcagcggcaacaccctgaccctgtaccagggcggccgcggcatcctgaagcagaacctgcagctggacagcttcagcacctaccgcgtgtacttcagcgtgagcggcgacgccaacgtgcgcatccgcaactcccgcgaggtgctgttcgagaagaggtacatgagcggcgccaaggacgtgagcgagatgttcaccaccaagttcgagaaggacaacttctacatcgagctgagccagggcaacaacctgtacggcggcccgatcgtgcacttctacgacgtgagcatcaagtaggagctctagatcttatctgcacaaagtggagtagtcagtcatcgatcaggaaccagacaccagacttttattcatacagtgaagtgaagtgaagtgcagtgcagtgagttgctggtttttgtacaacttagtatgtatttgtatttgtaaaatacttctatcaataaaatttctaattcctaaaaccaaaatccag

SEQ ID NO: 94 - RNA, 22 nt, Artificial Sequence
  miR2275a-3p initiator sequence
ugagauauuggaggaaaacaaa

SEQ ID NO: 95 - RNA, 21 nt, Artificial Sequence
  miR2275b-5p initiator sequence
gguucaguugccucuaauccu

SEQ ID NO: 96 - RNA, 22 nt, Artificial Sequence
  miR2275b-3p inititor sequence
ugagauauuagaggaaacugaa

SEQ ID NO: 97 - RNA, 22 nt, Artificial Sequence
  miR2275b-3p PHAS target initiator sequence
ugagauuuuagaguaaacugaa

SEQ ID NO: 98 - DNA, 22 bp, Artificial Sequence
  miR2275a-3p initiator sequence
tgagatattggaggaaaacaaa

SEQ ID NO: 99 - DNA, 21 bp, Artificial Sequence
  miR2275b-5p initiator sequence
ggttcagttgcctctaatcct

SEQ ID NO: 100 - DNA, 22 bp, Artificial Sequence
  miR2275b-3p inititor sequence
tgagatattagaggaaactgaa

SEQ ID NO: 101 - DNA, 22 bp, Artificial Sequence
  miR2275b-3p PHAS target initiator sequence
tgagattttagagtaaactgaa

SEQ ID NO: 102 - RNA, 22 nt, Zea mays
uucaguuuccucuaauaucuca

SEQ ID NO: 103 - RNA, 21 nt, Zea mays
aggauuagaggcaacugaacc

SEQ ID NO: 104 - DNA, 14454 bp, Artificial Sequence
  23705 vector
attcctgtggttggcatgcacatacaaatggacgaacggataaaccttttcacgcccttttaaatatccgattattctaataaacgctcttttctcttaggtttacccgccaatatatcctgtcaaacactgatagtttaaactggcactagcctaacggtgttgactaactaggccgcttccctaattagctaacccgggggcgcgccgggaccctaattagctaaggtacctgcagtgcagcgtgacccggtcgtgcccctctctagagataatgagcattgcatgtctaagttataaaaaattaccacatattttttttgtcacacttgtttgaagtgcagtttatctatctttatacatatatttaaactttactctacgaataatataatctatagtactacaataatatcagtgttttagagaatcatataaatgaacagttagacatggtctaaaggacaattgagtattttgacaacaggactctacagttttatctttttagtgtgcatgtgttctcctttttttttgcaaatagcttcacctatataatacttcatccattttattagtacatccatttagggtttagggttaatggtttttatagactaatttttttagtacatctattttattctattttagcctctaaattaagaaaactaaaactctattttagtttttttatttaataatttagatataaaatagaataaaataaagtgactaaaaattaaacaaataccctttaagaaattaaaaaaactaaggaaacatttttcttgtttcgagtagataatgccagcctgttaaacgccgtcgacgagtctaacggacaccaaccagcgaaccagcagcgtcgcgtcgggccaagcgaagcagacggcacggcatctctgtcgctgcctctggacccctctcgagagttccgctccaccgttggacttgctccgctgtcggcatccagaaattgcgtggcggagcggcagacgtgagccggcacggcaggcggcctcctcctcctctcacggcaccggcagctacgggggattcctttcccaccgctccttcgctttcccttcctcgcccgccgtaataaatagacaccccctccacaccctctttccccaacctcgtgttgttcggagcgcacacacacacaaccagatctcccccaaatccacccgtcggcacctccgcttcctaggtacgccgctcgtcctccccccccccccctctctaccttctctagatcggcgttccggtccatagttagggcccggtagttctacttctgttcatgtttgtgttagatccgtgtttgtgttagatccgtgctgctagcgttcgtacacggatgcgacctgtacgtcagacacgttctgattgctaacttgccagtgtttctctttggggaatcctgggatggctctagccgttccgcagacgggatcgatttcatgattttttttgtttcgttgcatagggtttggtttgcccttttcctttatttcaatatatgccgtgcacttgtttgtcgggtcatcttttcatgcttttttttgtcttggttgtgatgatgtggtctggttgggcggtcgttctagatcggagtagaattctgtttcaaactacctggtggatttattaattttggatctgtatgtgtgtgccatacatattcatagttacgaattgaagatgatggatggaaatatcgatctaggataggtatacatgttgatgcgggttttactgatgcatatacagagatgctttttgttcgcttggttgtgatgatgtggtgtggttgggcggtcgttcattcgttctagatcggagtagaatactgtttcaaactacctggtgtatttattaattttggaactgtatgtgtgtgtcatacatcttcatagttacgagtttaagatggatggaaatatcgatctaggataggtatacatgttgatgtgggttttactgatgcatatacatgatggcatatgcagcatctattcatatgctctaaccttgagtacctatctattataataaacaagtatgttttataattattttgatcttgatatacttggatgatggcatatccagcagctatatgtggatttttttagccctgccttcatacgctatttatttgcttggtactgtttcttttgtcgatgctcaccctgttgtttggtgttacttctgcaggatcctctaagtagcagccatgaacaagaacaacaccaagctgagcacccgcgccctgccgagcttcatcgactacttcaacggcatctacggcttcgccaccggcatcaaggacatcatgaacatgatcttcaagaccgacaccggcggcgacctgaccctggacgagatcctgaagaaccagcagctgctgaacgacatcagcggcaagctggacggcgtgaacggcagcctgaacgacctgatcgcccagggcaacctgaacaccgagctgagcaaggagatccttaagatcgccaacgagcagaaccaggtgctgaacgacgtgaacaacaagctggacgccatcaacaccatgctgcgcgtgtacctgccgaagatcaccagcatgctgagcgacgtgattaagcagaactacgccctgagcctgcagatcgagtacctgagcaagcagctgcaggagatcagcgacaagctggacatcatcaacgtgaacgtcctgatcaacagcaccctgaccgagatcaccccggcctaccagcgcatcaagtacgtgaacgagaagttcgaagagctgaccttcgccaccgagaccagcagcaaggtgaagaaggacggcagcccggccgacatcctggacgagctgaccgagctgaccgagctggcgaagagcgtgaccaagaacgacgtggacggcttcgagttctacctgaacaccttccacgacgtgatggtgggcaacaacctgttcggccgcagcgccctgaagaccgccagcgagctgatcaccaaggagaacgtgaagaccagcggcagcgaggtgggcaacgtgtacaacttcctgatcgtgctgaccgccctgcaggcccaggccttcctgaccctgaccacctgtcgcaagctgctgggcctggccgacatcgactacaccagcatcatgaacgagcacttgaacaaggagaaggaggagttccgcgtgaacatcctgccgaccctgagcaacaccttcagcaacccgaactacgccaaggtgaagggcagcgacgaggacgccaagatgatcgtggaggctaagccgggccacgcgttgatcggcttcgagatcagcaacgacagcatcaccgtgctgaaggtgtacgaggccaagctgaagcagaactaccaggtggacaaggacagcttgagcgaggtgatctacggcgacatggacaagctgctgtgtccggaccagagcgagcaaatctactacaccaacaacatcgtgttcccgaacgagtacgtgatcaccaagatcgacttcaccaagaagatgaagaccctgcgctacgaggtgaccgccaacttctacgacagcagcaccggcgagatcgacctgaacaagaagaaggtggagagcagcgaggccgagtaccgcaccctgagcgcgaacgacgacggcgtctacatgccactgggcgtgatcagcgagaccttcctgaccccgatcaacggctttggcctgcaggccgacgagaacagccgcctgatcaccctgacctgtaagagctacctgcgcgagctgctgctagccaccgacctgagcaacaaggagaccaagctgatcgtgccaccgagcggcttcatcagcaacatcgtggagaacggcagcatcgaggaggacaacctggagccgtggaaggccaacaacaagaacgcctacgtcgaccacaccggcggcgtgaacggcaccaaggccctgtacgtgcacaaggacggcggcatcagccagttcatcggcgacaagctgaagccgaagaccgagtacgtgatccagtacaccgtgaagggcaagccatcgattcacctgaaggacgagaacaccggctacatccactacgaggacaccaacaacaacctggaggactaccagaccatcaacaagcgcttcaccaccggcaccgacctgaagggcgtgtacctgatcctgaagagccagaacggcgacgaggcctggggcgacaacttcatcatcctggagatcagcccgagcgagaagctgctgagcccggagctgatcaacaccaacaactggaccagcaccggcagcaccaacatcagcggcaacaccctgaccctgtaccagggcggccgcggcatcctgaagcagaacctgcagctggacagcttcagcacctaccgcgtgtacttcagcgtgagcggcgacgccaacgtgcgcatccgcaactcccgcgaggtgctgttcgagaagaggtacatgagcggcgccaaggacgtgagcgagatgttcaccaccaagttcgagaaggacaacttctacatcgagctgagccagggcaacaacctgtacggcggcccgatcgtgcacttctacgacgtgagcatcaagtaggagctctagatcttatctgcacaaagtggagtagtcagtcatcgatcaggaaccagacaccagacttttattcatacagtgaagtgaagtgaagtgcagtgcagtgagttgctggtttttgtacaacttagtatgtatttgtatttgtaaaatacttctatcaataaaatttctaattcctaaaaccaaaatccaggctacacggaccgcgatcgcttaattaagcttgcatgcctgcagtgcagcgtgacccggtcgtgcccctctctagagataatgagcattgcatgtctaagttataaaaaattaccacatattttttttgtcacacttgtttgaagtgcagtttatctatctttatacatatatttaaactttactctacgaataatataatctatagtactacaataatatcagtgttttagagaatcatataaatgaacagttagacatggtctaaaggacaattgagtattttgacaacaggactctacagttttatctttttagtgtgcatgtgttctcctttttttttgcaaatagcttcacctatataatacttcatccattttattagtacatccatttagggtttagggttaatggtttttatagactaatttttttagtacatctattttattctattttagcctctaaattaagaaaactaaaactctattttagtttttttatttaataatttagatataaaatagaataaaataaagtgactaaaaattaaacaaataccctttaagaaattaaaaaaactaaggaaacatttttcttgtttcgagtagataatgccagcctgttaaacgccgccgacgagtctaacggacaccaaccagcgaaccagcagcgtcgcgtcgggccaagcgaagcagacggcacggcatctctgtcgctgcctctggacccctctcgagagttccgctccaccgttggacttgctccgctgtcggcatccagaaattgcgtggcggagcggcagacgtgagccggcacggcaggcggcctcctcctcctctcacggcaccggcagctacgggggattcctttcccaccgctccttcgctttcccttcctcgcccgccgtaataaatagacaccccctccacaccctctttccccaacctcgtgttgttcggagcgcacacacacacaaccagatctcccccaaatccacccgtcggcacctccgcttcaaggtacgccgctcgtcctccccccccccccctctctaccttctctagatcggcgttccggtccatagttagggcccggtagttctacttctgttcatgtttgtgttagatccgtgtttgtgttagatccgtgctgttagcgttcgtacacggatgcgacctgtacgtcagacacgttctgattgctaacttgccagtgtttctctttggggaatcctgggatggctctagccgttccgcagacgggatcgatttcatgattttttttgtttcgttgcatagggtttggtttgcccttttcctttatttcaatatatgccgtgcacttgtttgtcgggtcatcttttcatgcttttttttgtcttggttgtgatgatgtggtctggttgggcggtcgttctagatcggagtagaattctgtttcaaactacctggtggatttattaattttggatctgtatgtgtgtgccatacatattcatagttacgaattgaagatgatggatggaaatatcgatctaggataggtatacatgttgatgcgggttttactgatgcatatacagagatgctttttgttcgcttggttgtgatgatgtggtgtggttgggcggtcgttcattcgttctagatcggagtagaatactgtttcaaactacctggtgtatttattaattttggaactgtatgtgtgtgtcatacatcttcatagttacgagtttaagatggatggaaatatcgatctaggataggtatacatgttgatgtgggttttactgatgcatatacatgatggcatatgcagcatctattcatatgctctaaccttgagtacctatctattataataaacaagtatgttttataattattttgatcttgatatacttggatgatggcatatgcagcagctatatgtggatttttttagccctgccttcatacgctatttatttgcttggtactgtttcttttgtcgatgctcaccctgttgtttggtgttacttctgcagggatctccgatcatgcaaaaactcattaactcagtgcaaaactatgcctggggcagcaaaacggcgttgactgaactttatggtatggaaaatccgtccagccagccgatggccgagctgtggatgggcgcacatccgaaaagcagttcacgagtgcagaatgccgccggagatatcgtttcactgcgtgatgtgattgagagtgataaatcgactctgctcggagaggccgttgccaaacgctttggcgaactgcctttcctgttcaaagtattatgcgcagcacagccactctccattcaggttcatccaaacaaacacaattctgaaatcggttttgccaaagaaaatgccgcaggtatcccgatggatgccgccgagcgtaactataaagatcctaaccacaagccggagctggtttttgcgctgacgcctttccttgcgatgaacgcgtttcgtgaattttccgagattgtctccctactccagccggtcgcaggtgcacatccggcgattgctcactttttacaacagcctgatgccgaacgtttaagcgaactgttcgccagcctgttgaatatgcagggtgaagaaaaatcccgcgcgctggcgattttaaaatcggccctcgatagccagcagggtgaaccgtggcaaacgattcgtttaatttctgaattttacccggaagacagcggtctgttctccccgctattgctgaatgtggtgaaattgaaccctggcgaagcgatgttcctgttcgctgaaacaccgcacgcttacctgcaaggcgtggcgctggaagtgatggcaaactccgataacgtgctgcgtgcgggtctgacgcctaaatacattgatattccggaactggttgccaatgtgaaattcgaagccaaaccggctaaccagttgttgacccagccggtgaaacaaggtgcagaactggacttcccgattccagtggatgattttgccttctcgctgcatgaccttagtgataaagaaaccaccattagccagcagagtgccgccattttgttctgcgtcgaaggcgatgcaacgttgtggaaaggttctcagcagttacagcttaaaccgggtgaatcagcgtttattgccgccaacgaatcaccggtgactgtcaaaggccacggccgtttagcgcgtgtttacaacaagctgtaagagcttactgaaaaaattaacatctcttgctaagctgggtcatgggtcgtttaagctgccgatgtgcctgcgtcgtctggtgccctctctccatatggaggttgtcaaagtatctgctgttcgtgtcatgagtcgtgtcagtgttggtttaataatggaccggttgtgttgtgtgtgcgtactacccagaactatgacaaatcatgaataagtttgatgtttgaaattaaagcctgtgctcattatgttctgtctttcagttgtctcctaatatttgcctccaggtactggctatctaccgtttcttacttaggaggtgtttgaatgcactaaaactaatagttagtggctaaaattagttaaaacatccaaacaccatagctaatagttgaactattagctatttttggaaaattagttaatagtgaggtagttatttgttagctagctaattcaactaacaatttttagccaactaacaattagtttcagtgcattcaaacacccccttaatgttaacgtggttctatctaccgtctcctaatatatggttgattgttcggtttgttgctatgctattgggttctgattgctgctagttcttgctgaatccagaagttctcgtagtatagctcagattcatattatttatttgagtgataagtgatccaggttattactatgttagctaggttttttttacaaggataaattatctgtgatcataattcttatgaaagctttatgtttcctggaggcagtggcatgcaatgcatgacagcaacttgatcacaccagctgaggtagatacggtaacaaggttcttaaatctgttcaccaaatcattggagaacacacatacacattcttgccagtcttggttagagaaatttcatgacaaaatgccaaagctgtcttgactcttcacttttggccatgagtcgtgacttagtttggtttaatggaccggttctcctagcttgttctactcaaaactgttgttgatgcgaataagttgtgatggttgatctctggattttgttttgctctcaatagtggacgagattagatagcctgcaggcccgggggcgcgccctaattagctaacggccaggatcgccgcgtgagcctttagcaactagctagattaattaacgcaatctgttattaagttgtctaagcgtcaatttgtttacaccacaatatatcctgccaccagccagccaacagctccccgaccggcagctcggcacaaaatcaccactcgatacaggcagcccatcagaattaattctcatgtttgacagcttatcatcgactgcacggtgcaccaatgcttctggcgtcaggcagccatcggaagctgtggtatggctgtgcaggtcgtaaatcactgcataattcgtgtcgctcaaggcgcactcccgttctggataatgttttttgcgccgacatcataacggttctggcaaatattctgaaatgagctgttgacaattaatcatccggctcgtataatgtgtggaattgtgagcggataacaatttcacacaggaaacagaccatgagggaagcgttgatcgccgaagtatcgactcaactatcagaggtagttggcgtcatcgagcgccatctcgaaccgacgttgctggccgtacatttgtacggctccgcagtggatggcggcctgaagccacacagtgatattgatttgctggttacggtgaccgtaaggcttgatgaaacaacgcggcgagctttgatcaacgaccttttggaaacttcggcttcccctggagagagcgagattctccgcgctgtagaagtcaccattgttgtgcacgacgacatcattccgtggcgttatccagctaagcgcgaactgcaatttggagaatggcagcgcaatgacattcttgcaggtatcttcgagccagccacgatcgacattgatctggctatcttgctgacaaaagcaagagaacatagcgttgccttggtaggtccagcggcggaggaactctttgatccggttcctgaacaggatctatttgaggcgctaaatgaaaccttaacgctatggaactcgccgcccgactgggctggcgatgagcgaaatgtagtgcttacgttgtcccgcatttggtacagcgcagtaaccggcaaaatcgcgccgaaggatgtcgctgccgactgggcaatggagcgcctgccggcccagtatcagcccgtcatacttgaagctaggcaggcttatcttggacaagaagatcgcttggcctcgcgcgcagatcagttggaagaatttgttcactacgtgaaaggcgagatcaccaaagtagtcggcaaataaagctctagtggatctccgtacccagggatctggctcgcggcggacgcacgacgccggggcgagaccataggcgatctcctaaatcaatagtagctgtaacctcgaagcgtttcacttgtaacaacgattgagaatttttgtcataaaattgaaatacttggttcgcatttttgtcatccgcggtcagccgcaattctgacgaactgcccatttagctggagatgattgtacatccttcacgtgaaaatttctcaagcgctgtgaacaagggttcagattttagattgaaaggtgagccgttgaaacacgttcttcttgtcgatgacgacgtcgctatgcggcatcttattattgaataccttacgatccacgccttcaaagtgaccgcggtagccgacagcacccagttcacaagagtactctcttccgcgacggtcgatgtcgtggttgttgatctagatttaggtcgtgaagatgggctcgagatcgttcgtaatctggcggcaaagtctgatattccaatcataattatcagtggcgaccgccttgaggagacggataaagttgttgcactcgagctaggagcaagtgattttatcgctaagccgttcagtatcagagagtttctagcacgcattcgggttgccttgcgcgtgcgccccaacgttgtccgctccaaagaccgacggtctttttgttttactgactggacacttaatctcaggcaacgtcgcttgatgtccgaagctggcggtgaggtgaaacttacggcaggtgagttcaatcttctcctcgcgtttttagagaaaccccgcgacgttctatcgcgcgagcaacttctcattgccagtcgagtacgcgacgaggaggtttatgacaggagtatagatgttctcattttgaggctgcgccgcaaacttgaggcagatccgtcaagccctcaactgataaaaacagcaagaggtgccggttatttctttgacgcggacgtgcaggtttcgcacggggggacgatggcagcctgagccaattcccagatccccgaggaatcggcgtgagcggtcgcaaaccatccggcccggtacaaatcggcgcggcgctgggtgatgacctggtggagaagttgaaggccgcgcaggccgcccagcggcaacgcatcgaggcagaagcacgccccggtgaatcgtggcaagcggccgctgatcgaatccgcaaagaatcccggcaaccgccggcagccggtgcgccgtcgattaggaagccgcccaagggcgacgagcaaccagattttttcgttccgatgctctatgacgtgggcacccgcgatagtcgcagcatcatggacgtggccgttttccgtctgtcgaagcgtgaccgacgagctggcgaggtgatccgctacgagcttccagacgggcacgtagaggtttccgcagggccggccggcatggccagtgtgtgggattacgacctggtactgatggcggtttcccatctaaccgaatccatgaaccgataccgggaagggaagggagacaagcccggccgcgtgttccgtccacacgttgcggacgtactcaagttctgccggcgagccgatggcggaaagcagaaagacgacctggtagaaacctgcattcggttaaacaccacgcacgttgccatgcagcgtacgaagaaggccaagaacggccgcctggtgacggtatccgagggtgaagccttgattagccgctacaagatcgtaaagagcgaaaccgggcggccggagtacatcgagatcgagctggctgattggatgtaccgcgagatcacagaaggcaagaacccggacgtgctgacggttcaccccgattactttttgatcgatcccggcatcggccgttttctctaccgcctggcacgccgcgccgcaggcaaggcagaagccagatggttgttcaagacgatctacgaacgcagtggcagcgccggagagttcaagaagttctgtttcaccgtgcgcaagctgatcgggtcaaatgacctgccggagtacgatttgaaggaggaggcggggcaggctggcccgatcctagtcatgcgctaccgcaacctgatcgagggcgaagcatccgccggttcctaatgtacggagcagatgctagggcaaattgccctagcaggggaaaaaggtcgaaaaggtctctttcctgtggatagcacgtacattgggaacccaaagccgtacattgggaaccggaacccgtacattgggaacccaaagccgtacattgggaaccggtcacacatgtaagtgactgatataaaagagaaaaaaggcgatttttccgcctaaaactctttaaaacttattaaaactcttaaaacccgcctggcctgtgcataactgtctggccagcgcacagccgaagagctgcaaaaagcgcctacccttcggtcgctgcgctccctacgccccgccgcttcgcgtcggcctatcgcggccgctggccgctcaaaaatggctggcctacggccaggcaatctaccagggcgcggacaagccgcgccgtcgccactcgaccgccggcgctgaggtctgcctcgtgaagaaggtgttgctgactcataccaggcctgaatcgccccatcatccagccagaaagtgagggagccacggttgatgagagctttgttgtaggtggaccagttggtgattttgaacttttgctttgccacggaacggtctgcgttgtcgggaagatgcgtgatctgatccttcaactcagcaaaagttcgatttattcaacaaagccgccgtcccgtcaagtcagcgtaatgctctgccagtgttacaaccaattaaccaattctgattagaaaaactcatcgagcatcaaatgaaactgcaatttattcatatcaggattatcaataccatatttttgaaaaagccgtttctgtaatgaaggagaaaactcaccgaggcagttccataggatggcaagatcctggtatcggtctgcgattccgactcgtccaacatcaatacaacctattaatttcccctcgtcaaaaataaggttatcaagtgagaaatcaccatgagtgacgactgaatccggtgagaatggcaaaagctctgcattaatgaatcggccaacgcgcggggagaggcggtttgcgtattgggcgctcttccgcttcctcgctcactgactcgctgcgctcggtcgttcggctgcggcgagcggtatcagctcactcaaaggcggtaatacggttatccacagaatcaggggataacgcaggaaagaacatgtgagcaaaaggccagcaaaaggccaggaaccgtaaaaaggccgcgttgctggcgtttttccataggctccgcccccctgacgagcatcacaaaaatcgacgctcaagtcagaggtggcgaaacccgacaggactataaagataccaggcgtttccccctggaagctccctcgtgcgctctcctgttccgaccctgccgcttaccggatacctgtccgcctttctcccttcgggaagcgtggcgctttctcatagctcacgctgtaggtatctcagttcggtgtaggtcgttcgctccaagctgggctgtgtgcacgaaccccccgttcagcccgaccgctgcgccttatccggtaactatcgtcttgagtccaacccggtaagacacgacttatcgccactggcagcagccactggtaacaggattagcagagcgaggtatgtaggcggtgctacagagttcttgaagtggtggcctaactacggctacactagaagaacagtatttggtatctgcgctctgctgaagccagttaccttcggaaaaagagttggtagctcttgatccggcaaacaaaccaccgctggtagcggtggtttttttgtttgcaagcagcagattacgcgcagaaaaaaaggatctcaagaagatcctttgatcttttctacggggtctgacgctcagtggaacgaaaactcacgttaagggattttggtcatgagattatcaaaaaggatcttcacctagatccttttgatccggaatta

SEQ ID NO: 105 - DNA, 14500 bp, Artificial Sequence
  23708 vector
attcctgtggttggcatgcacatacaaatggacgaacggataaaccttttcacgcccttttaaatatccgattattctaataaacgctcttttctcttaggtttacccgccaatatatcctgtcaaacactgatagtttaaactggcactagcctaacggtgttgactaactaggccgcttccctaattagctaacccgggggcgcgccgggaccctaattagctaaggtacctgcagtgcagcgtgacccggtcgtgcccctctctagagataatgagcattgcatgtctaagttataaaaaattaccacatattttttttgtcacacttgtttgaagtgcagtttatctatctttatacatatatttaaactttactctacgaataatataatctatagtactacaataatatcagtgttttagagaatcatataaatgaacagttagacatggtctaaaggacaattgagtattttgacaacaggactctacagttttatctttttagtgtgcatgtgttctcctttttttttgcaaatagcttcacctatataatacttcatccattttattagtacatccatttagggtttagggttaatggtttttatagactaatttttttagtacatctattttattctattttagcctctaaattaagaaaactaaaactctattttagtttttttatttaataatttagatataaaatagaataaaataaagtgactaaaaattaaacaaataccctttaagaaattaaaaaaactaaggaaacatttttcttgtttcgagtagataatgccagcctgttaaacgccgtcgacgagtctaacggacaccaaccagcgaaccagcagcgtcgcgtcgggccaagcgaagcagacggcacggcatctctgtcgctgcctctggacccctctcgagagttccgctccaccgttggacttgctccgctgtcggcatccagaaattgcgtggcggagcggcagacgtgagccggcacggcaggcggcctcctcctcctctcacggcaccggcagctacgggggattcctttcccaccgctccttcgctttcccttcctcgcccgccgtaataaatagacaccccctccacaccctctttccccaacctcgtgttgttcggagcgcacacacacacaaccagatctcccccaaatccacccgtcggcacctccgcttcctaggtacgccgctcgtcctccccccccccccctctctaccttctctagatcggcgttccggtccatagttagggcccggtagttctacttctgttcatgtttgtgttagatccgtgtttgtgttagatccgtgctgctagcgttcgtacacggatgcgacctgtacgtcagacacgttctgattgctaacttgccagtgtttctctttggggaatcctgggatggctctagccgttccgcagacgggatcgatttcatgattttttttgtttcgttgcatagggtttggtttgcccttttcctttatttcaatatatgccgtgcacttgtttgtcgggtcatcttttcatgcttttttttgtcttggttgtgatgatgtggtctggttgggcggtcgttctagatcggagtagaattctgtttcaaactacctggtggatttattaattttggatctgtatgtgtgtgccatacatattcatagttacgaattgaagatgatggatggaaatatcgatctaggataggtatacatgttgatgcgggttttactgatgcatatacagagatgctttttgttcgcttggttgtgatgatgtggtgtggttgggcggtcgttcattcgttctagatcggagtagaatactgtttcaaactacctggtgtatttattaattttggaactgtatgtgtgtgtcatacatcttcatagttacgagtttaagatggatggaaatatcgatctaggataggtatacatgttgatgtgggttttactgatgcatatacatgatggcatatgcagcatctattcatatgctctaaccttgagtacctatctattataataaacaagtatgttttataattattttgatcttgatatacttggatgatggcatatccagcagctatatgtggatttttttagccctgccttcatacgctatttatttgcttggtactgtttcttttgtcgatgctcaccctgttgtttggtgttacttctgcaggatcctctaagtagcagccatgaacaagaacaacaccaagctgagcacccgcgccctgccgagcttcatcgactacttcaacggcatctacggcttcgccaccggcatcaaggacatcatgaacatgatcttcaagaccgacaccggcggcgacctgaccctggacgagatcctgaagaaccagcagctgctgaacgacatcagcggcaagctggacggcgtgaacggcagcctgaacgacctgatcgcccagggcaacctgaacaccgagctgagcaaggagatccttaagatcgccaacgagcagaaccaggtgctgaacgacgtgaacaacaagctggacgccatcaacaccatgctgcgcgtgtacctgccgaagatcaccagcatgctgagcgacgtgattaagcagaactacgccctgagcctgcagatcgagtacctgagcaagcagctgcaggagatcagcgacaagctggacatcatcaacgtgaacgtcctgatcaacagcaccctgaccgagatcaccccggcctaccagcgcatcaagtacgtgaacgagaagttcgaagagctgaccttcgccaccgagaccagcagcaaggtgaagaaggacggcagcccggccgacatcctggacgagctgaccgagctgaccgagctggcgaagagcgtgaccaagaacgacgtggacggcttcgagttctacctgaacaccttccacgacgtgatggtgggcaacaacctgttcggccgcagcgccctgaagaccgccagcgagctgatcaccaaggagaacgtgaagaccagcggcagcgaggtgggcaacgtgtacaacttcctgatcgtgctgaccgccctgcaggcccaggccttcctgaccctgaccacctgtcgcaagctgctgggcctggccgacatcgactacaccagcatcatgaacgagcacttgaacaaggagaaggaggagttccgcgtgaacatcctgccgaccctgagcaacaccttcagcaacccgaactacgccaaggtgaagggcagcgacgaggacgccaagatgatcgtggaggctaagccgggccacgcgttgatcggcttcgagatcagcaacgacagcatcaccgtgctgaaggtgtacgaggccaagctgaagcagaactaccaggtggacaaggacagcttgagcgaggtgatctacggcgacatggacaagctgctgtgtccggaccagagcgagcaaatctactacaccaacaacatcgtgttcccgaacgagtacgtgatcaccaagatcgacttcaccaagaagatgaagaccctgcgctacgaggtgaccgccaacttctacgacagcagcaccggcgagatcgacctgaacaagaagaaggtggagagcagcgaggccgagtaccgcaccctgagcgcgaacgacgacggcgtctacatgccactgggcgtgatcagcgagaccttcctgaccccgatcaacggctttggcctgcaggccgacgagaacagccgcctgatcaccctgacctgtaagagctacctgcgcgagctgctgctagccaccgacctgagcaacaaggagaccaagctgatcgtgccaccgagcggcttcatcagcaacatcgtggagaacggcagcatcgaggaggacaacctggagccgtggaaggccaacaacaagaacgcctacgtcgaccacaccggcggcgtgaacggcaccaaggccctgtacgtgcacaaggacggcggcatcagccagttcatcggcgacaagctgaagccgaagaccgagtacgtgatccagtacaccgtgaagggcaagccatcgattcacctgaaggacgagaacaccggctacatccactacgaggacaccaacaacaacctggaggactaccagaccatcaacaagcgcttcaccaccggcaccgacctgaagggcgtgtacctgatcctgaagagccagaacggcgacgaggcctggggcgacaacttcatcatcctggagatcagcccgagcgagaagctgctgagcccggagctgatcaacaccaacaactggaccagcaccggcagcaccaacatcagcggcaacaccctgaccctgtaccagggcggccgcggcatcctgaagcagaacctgcagctggacagcttcagcacctaccgcgtgtacttcagcgtgagcggcgacgccaacgtgcgcatccgcaactcccgcgaggtgctgttcgagaagaggtacatgagcggcgccaaggacgtgagcgagatgttcaccaccaagttcgagaaggacaacttctacatcgagctgagccagggcaacaacctgtacggcggcccgatcgtgcacttctacgacgtgagcatcaagtaggagctctgatgcacagattgggatgagatattggaggaaaacaaagagggactgacaattatctgcacaaagtggagtagtcagtcatcgatcaggaaccagacaccagacttttattcatacagtgaagtgaagtgaagtgcagtgcagtgagttgctggtttttgtacaacttagtatgtatttgtatttgtaaaatacttctatcaataaaatttctaattcctaaaaccaaaatccaggctacacggaccgcgatcgcttaattaagcttgcatgcctgcagtgcagcgtgacccggtcgtgcccctctctagagataatgagcattgcatgtctaagttataaaaaattaccacatattttttttgtcacacttgtttgaagtgcagtttatctatctttatacatatatttaaactttactctacgaataatataatctatagtactacaataatatcagtgttttagagaatcatataaatgaacagttagacatggtctaaaggacaattgagtattttgacaacaggactctacagttttatctttttagtgtgcatgtgttctcctttttttttgcaaatagcttcacctatataatacttcatccattttattagtacatccatttagggtttagggttaatggtttttatagactaatttttttagtacatctattttattctattttagcctctaaattaagaaaactaaaactctattttagtttttttatttaataatttagatataaaatagaataaaataaagtgactaaaaattaaacaaataccctttaagaaattaaaaaaactaaggaaacatttttcttgtttcgagtagataatgccagcctgttaaacgccgccgacgagtctaacggacaccaaccagcgaaccagcagcgtcgcgtcgggccaagcgaagcagacggcacggcatctctgtcgctgcctctggacccctctcgagagttccgctccaccgttggacttgctccgctgtcggcatccagaaattgcgtggcggagcggcagacgtgagccggcacggcaggcggcctcctcctcctctcacggcaccggcagctacgggggattcctttcccaccgctccttcgctttcccttcctcgcccgccgtaataaatagacaccccctccacaccctctttccccaacctcgtgttgttcggagcgcacacacacacaaccagatctcccccaaatccacccgtcggcacctccgcttcaaggtacgccgctcgtcctccccccccccccctctctaccttctctagatcggcgttccggtccatagttagggcccggtagttctacttctgttcatgtttgtgttagatccgtgtttgtgttagatccgtgctgttagcgttcgtacacggatgcgacctgtacgtcagacacgttctgattgctaacttgccagtgtttctctttggggaatcctgggatggctctagccgttccgcagacgggatcgatttcatgattttttttgtttcgttgcatagggtttggtttgcccttttcctttatttcaatatatgccgtgcacttgtttgtcgggtcatcttttcatgcttttttttgtcttggttgtgatgatgtggtctggttgggcggtcgttctagatcggagtagaattctgtttcaaactacctggtggatttattaattttggatctgtatgtgtgtgccatacatattcatagttacgaattgaagatgatggatggaaatatcgatctaggataggtatacatgttgatgcgggttttactgatgcatatacagagatgctttttgttcgcttggttgtgatgatgtggtgtggttgggcggtcgttcattcgttctagatcggagtagaatactgtttcaaactacctggtgtatttattaattttggaactgtatgtgtgtgtcatacatcttcatagttacgagtttaagatggatggaaatatcgatctaggataggtatacatgttgatgtgggttttactgatgcatatacatgatggcatatgcagcatctattcatatgctctaaccttgagtacctatctattataataaacaagtatgttttataattattttgatcttgatatacttggatgatggcatatgcagcagctatatgtggatttttttagccctgccttcatacgctatttatttgcttggtactgtttcttttgtcgatgctcaccctgttgtttggtgttacttctgcagggatctccgatcatgcaaaaactcattaactcagtgcaaaactatgcctggggcagcaaaacggcgttgactgaactttatggtatggaaaatccgtccagccagccgatggccgagctgtggatgggcgcacatccgaaaagcagttcacgagtgcagaatgccgccggagatatcgtttcactgcgtgatgtgattgagagtgataaatcgactctgctcggagaggccgttgccaaacgctttggcgaactgcctttcctgttcaaagtattatgcgcagcacagccactctccattcaggttcatccaaacaaacacaattctgaaatcggttttgccaaagaaaatgccgcaggtatcccgatggatgccgccgagcgtaactataaagatcctaaccacaagccggagctggtttttgcgctgacgcctttccttgcgatgaacgcgtttcgtgaattttccgagattgtctccctactccagccggtcgcaggtgcacatccggcgattgctcactttttacaacagcctgatgccgaacgtttaagcgaactgttcgccagcctgttgaatatgcagggtgaagaaaaatcccgcgcgctggcgattttaaaatcggccctcgatagccagcagggtgaaccgtggcaaacgattcgtttaatttctgaattttacccggaagacagcggtctgttctccccgctattgctgaatgtggtgaaattgaaccctggcgaagcgatgttcctgttcgctgaaacaccgcacgcttacctgcaaggcgtggcgctggaagtgatggcaaactccgataacgtgctgcgtgcgggtctgacgcctaaatacattgatattccggaactggttgccaatgtgaaattcgaagccaaaccggctaaccagttgttgacccagccggtgaaacaaggtgcagaactggacttcccgattccagtggatgattttgccttctcgctgcatgaccttagtgataaagaaaccaccattagccagcagagtgccgccattttgttctgcgtcgaaggcgatgcaacgttgtggaaaggttctcagcagttacagcttaaaccgggtgaatcagcgtttattgccgccaacgaatcaccggtgactgtcaaaggccacggccgtttagcgcgtgtttacaacaagctgtaagagcttactgaaaaaattaacatctcttgctaagctgggtcatgggtcgtttaagctgccgatgtgcctgcgtcgtctggtgccctctctccatatggaggttgtcaaagtatctgctgttcgtgtcatgagtcgtgtcagtgttggtttaataatggaccggttgtgttgtgtgtgcgtactacccagaactatgacaaatcatgaataagtttgatgtttgaaattaaagcctgtgctcattatgttctgtctttcagttgtctcctaatatttgcctccaggtactggctatctaccgtttcttacttaggaggtgtttgaatgcactaaaactaatagttagtggctaaaattagttaaaacatccaaacaccatagctaatagttgaactattagctatttttggaaaattagttaatagtgaggtagttatttgttagctagctaattcaactaacaatttttagccaactaacaattagtttcagtgcattcaaacacccccttaatgttaacgtggttctatctaccgtctcctaatatatggttgattgttcggtttgttgctatgctattgggttctgattgctgctagttcttgctgaatccagaagttctcgtagtatagctcagattcatattatttatttgagtgataagtgatccaggttattactatgttagctaggttttttttacaaggataaattatctgtgatcataattcttatgaaagctttatgtttcctggaggcagtggcatgcaatgcatgacagcaacttgatcacaccagctgaggtagatacggtaacaaggttcttaaatctgttcaccaaatcattggagaacacacatacacattcttgccagtcttggttagagaaatttcatgacaaaatgccaaagctgtcttgactcttcacttttggccatgagtcgtgacttagtttggtttaatggaccggttctcctagcttgttctactcaaaactgttgttgatgcgaataagttgtgatggttgatctctggattttgttttgctctcaatagtggacgagattagatagcctgcaggcccgggggcgcgccctaattagctaacggccaggatcgccgcgtgagcctttagcaactagctagattaattaacgcaatctgttattaagttgtctaagcgtcaatttgtttacaccacaatatatcctgccaccagccagccaacagctccccgaccggcagctcggcacaaaatcaccactcgatacaggcagcccatcagaattaattctcatgtttgacagcttatcatcgactgcacggtgcaccaatgcttctggcgtcaggcagccatcggaagctgtggtatggctgtgcaggtcgtaaatcactgcataattcgtgtcgctcaaggcgcactcccgttctggataatgttttttgcgccgacatcataacggttctggcaaatattctgaaatgagctgttgacaattaatcatccggctcgtataatgtgtggaattgtgagcggataacaatttcacacaggaaacagaccatgagggaagcgttgatcgccgaagtatcgactcaactatcagaggtagttggcgtcatcgagcgccatctcgaaccgacgttgctggccgtacatttgtacggctccgcagtggatggcggcctgaagccacacagtgatattgatttgctggttacggtgaccgtaaggcttgatgaaacaacgcggcgagctttgatcaacgaccttttggaaacttcggcttcccctggagagagcgagattctccgcgctgtagaagtcaccattgttgtgcacgacgacatcattccgtggcgttatccagctaagcgcgaactgcaatttggagaatggcagcgcaatgacattcttgcaggtatcttcgagccagccacgatcgacattgatctggctatcttgctgacaaaagcaagagaacatagcgttgccttggtaggtccagcggcggaggaactctttgatccggttcctgaacaggatctatttgaggcgctaaatgaaaccttaacgctatggaactcgccgcccgactgggctggcgatgagcgaaatgtagtgcttacgttgtcccgcatttggtacagcgcagtaaccggcaaaatcgcgccgaaggatgtcgctgccgactgggcaatggagcgcctgccggcccagtatcagcccgtcatacttgaagctaggcaggcttatcttggacaagaagatcgcttggcctcgcgcgcagatcagttggaagaatttgttcactacgtgaaaggcgagatcaccaaagtagtcggcaaataaagctctagtggatctccgtacccagggatctggctcgcggcggacgcacgacgccggggcgagaccataggcgatctcctaaatcaatagtagctgtaacctcgaagcgtttcacttgtaacaacgattgagaatttttgtcataaaattgaaatacttggttcgcatttttgtcatccgcggtcagccgcaattctgacgaactgcccatttagctggagatgattgtacatccttcacgtgaaaatttctcaagcgctgtgaacaagggttcagattttagattgaaaggtgagccgttgaaacacgttcttcttgtcgatgacgacgtcgctatgcggcatcttattattgaataccttacgatccacgccttcaaagtgaccgcggtagccgacagcacccagttcacaagagtactctcttccgcgacggtcgatgtcgtggttgttgatctagatttaggtcgtgaagatgggctcgagatcgttcgtaatctggcggcaaagtctgatattccaatcataattatcagtggcgaccgccttgaggagacggataaagttgttgcactcgagctaggagcaagtgattttatcgctaagccgttcagtatcagagagtttctagcacgcattcgggttgccttgcgcgtgcgccccaacgttgtccgctccaaagaccgacggtctttttgttttactgactggacacttaatctcaggcaacgtcgcttgatgtccgaagctggcggtgaggtgaaacttacggcaggtgagttcaatcttctcctcgcgtttttagagaaaccccgcgacgttctatcgcgcgagcaacttctcattgccagtcgagtacgcgacgaggaggtttatgacaggagtatagatgttctcattttgaggctgcgccgcaaacttgaggcagatccgtcaagccctcaactgataaaaacagcaagaggtgccggttatttctttgacgcggacgtgcaggtttcgcacggggggacgatggcagcctgagccaattcccagatccccgaggaatcggcgtgagcggtcgcaaaccatccggcccggtacaaatcggcgcggcgctgggtgatgacctggtggagaagttgaaggccgcgcaggccgcccagcggcaacgcatcgaggcagaagcacgccccggtgaatcgtggcaagcggccgctgatcgaatccgcaaagaatcccggcaaccgccggcagccggtgcgccgtcgattaggaagccgcccaagggcgacgagcaaccagattttttcgttccgatgctctatgacgtgggcacccgcgatagtcgcagcatcatggacgtggccgttttccgtctgtcgaagcgtgaccgacgagctggcgaggtgatccgctacgagcttccagacgggcacgtagaggtttccgcagggccggccggcatggccagtgtgtgggattacgacctggtactgatggcggtttcccatctaaccgaatccatgaaccgataccgggaagggaagggagacaagcccggccgcgtgttccgtccacacgttgcggacgtactcaagttctgccggcgagccgatggcggaaagcagaaagacgacctggtagaaacctgcattcggttaaacaccacgcacgttgccatgcagcgtacgaagaaggccaagaacggccgcctggtgacggtatccgagggtgaagccttgattagccgctacaagatcgtaaagagcgaaaccgggcggccggagtacatcgagatcgagctggctgattggatgtaccgcgagatcacagaaggcaagaacccggacgtgctgacggttcaccccgattactttttgatcgatcccggcatcggccgttttctctaccgcctggcacgccgcgccgcaggcaaggcagaagccagatggttgttcaagacgatctacgaacgcagtggcagcgccggagagttcaagaagttctgtttcaccgtgcgcaagctgatcgggtcaaatgacctgccggagtacgatttgaaggaggaggcggggcaggctggcccgatcctagtcatgcgctaccgcaacctgatcgagggcgaagcatccgccggttcctaatgtacggagcagatgctagggcaaattgccctagcaggggaaaaaggtcgaaaaggtctctttcctgtggatagcacgtacattgggaacccaaagccgtacattgggaaccggaacccgtacattgggaacccaaagccgtacattgggaaccggtcacacatgtaagtgactgatataaaagagaaaaaaggcgatttttccgcctaaaactctttaaaacttattaaaactcttaaaacccgcctggcctgtgcataactgtctggccagcgcacagccgaagagctgcaaaaagcgcctacccttcggtcgctgcgctccctacgccccgccgcttcgcgtcggcctatcgcggccgctggccgctcaaaaatggctggcctacggccaggcaatctaccagggcgcggacaagccgcgccgtcgccactcgaccgccggcgctgaggtctgcctcgtgaagaaggtgttgctgactcataccaggcctgaatcgccccatcatccagccagaaagtgagggagccacggttgatgagagctttgttgtaggtggaccagttggtgattttgaacttttgctttgccacggaacggtctgcgttgtcgggaagatgcgtgatctgatccttcaactcagcaaaagttcgatttattcaacaaagccgccgtcccgtcaagtcagcgtaatgctctgccagtgttacaaccaattaaccaattctgattagaaaaactcatcgagcatcaaatgaaactgcaatttattcatatcaggattatcaataccatatttttgaaaaagccgtttctgtaatgaaggagaaaactcaccgaggcagttccataggatggcaagatcctggtatcggtctgcgattccgactcgtccaacatcaatacaacctattaatttcccctcgtcaaaaataaggttatcaagtgagaaatcaccatgagtgacgactgaatccggtgagaatggcaaaagctctgcattaatgaatcggccaacgcgcggggagaggcggtttgcgtattgggcgctcttccgcttcctcgctcactgactcgctgcgctcggtcgttcggctgcggcgagcggtatcagctcactcaaaggcggtaatacggttatccacagaatcaggggataacgcaggaaagaacatgtgagcaaaaggccagcaaaaggccaggaaccgtaaaaaggccgcgttgctggcgtttttccataggctccgcccccctgacgagcatcacaaaaatcgacgctcaagtcagaggtggcgaaacccgacaggactataaagataccaggcgtttccccctggaagctccctcgtgcgctctcctgttccgaccctgccgcttaccggatacctgtccgcctttctcccttcgggaagcgtggcgctttctcatagctcacgctgtaggtatctcagttcggtgtaggtcgttcgctccaagctgggctgtgtgcacgaaccccccgttcagcccgaccgctgcgccttatccggtaactatcgtcttgagtccaacccggtaagacacgacttatcgccactggcagcagccactggtaacaggattagcagagcgaggtatgtaggcggtgctacagagttcttgaagtggtggcctaactacggctacactagaagaacagtatttggtatctgcgctctgctgaagccagttaccttcggaaaaagagttggtagctcttgatccggcaaacaaaccaccgctggtagcggtggtttttttgtttgcaagcagcagattacgcgcagaaaaaaaggatctcaagaagatcctttgatcttttctacggggtctgacgctcagtggaacgaaaactcacgttaagggattttggtcatgagattatcaaaaaggatcttcacctagatccttttgatccggaatta

SEQ ID NO: 106 - DNA, 14499 bp, Artificial Sequence
  23711 vector
attcctgtggttggcatgcacatacaaatggacgaacggataaaccttttcacgcccttttaaatatccgattattctaataaacgctcttttctcttaggtttacccgccaatatatcctgtcaaacactgatagtttaaactggcactagcctaacggtgttgactaactaggccgcttccctaattagctaacccgggggcgcgccgggaccctaattagctaaggtacctgcagtgcagcgtgacccggtcgtgcccctctctagagataatgagcattgcatgtctaagttataaaaaattaccacatattttttttgtcacacttgtttgaagtgcagtttatctatctttatacatatatttaaactttactctacgaataatataatctatagtactacaataatatcagtgttttagagaatcatataaatgaacagttagacatggtctaaaggacaattgagtattttgacaacaggactctacagttttatctttttagtgtgcatgtgttctcctttttttttgcaaatagcttcacctatataatacttcatccattttattagtacatccatttagggtttagggttaatggtttttatagactaatttttttagtacatctattttattctattttagcctctaaattaagaaaactaaaactctattttagtttttttatttaataatttagatataaaatagaataaaataaagtgactaaaaattaaacaaataccctttaagaaattaaaaaaactaaggaaacatttttcttgtttcgagtagataatgccagcctgttaaacgccgtcgacgagtctaacggacaccaaccagcgaaccagcagcgtcgcgtcgggccaagcgaagcagacggcacggcatctctgtcgctgcctctggacccctctcgagagttccgctccaccgttggacttgctccgctgtcggcatccagaaattgcgtggcggagcggcagacgtgagccggcacggcaggcggcctcctcctcctctcacggcaccggcagctacgggggattcctttcccaccgctccttcgctttcccttcctcgcccgccgtaataaatagacaccccctccacaccctctttccccaacctcgtgttgttcggagcgcacacacacacaaccagatctcccccaaatccacccgtcggcacctccgcttcctaggtacgccgctcgtcctccccccccccccctctctaccttctctagatcggcgttccggtccatagttagggcccggtagttctacttctgttcatgtttgtgttagatccgtgtttgtgttagatccgtgctgctagcgttcgtacacggatgcgacctgtacgtcagacacgttctgattgctaacttgccagtgtttctctttggggaatcctgggatggctctagccgttccgcagacgggatcgatttcatgattttttttgtttcgttgcatagggtttggtttgcccttttcctttatttcaatatatgccgtgcacttgtttgtcgggtcatcttttcatgcttttttttgtcttggttgtgatgatgtggtctggttgggcggtcgttctagatcggagtagaattctgtttcaaactacctggtggatttattaattttggatctgtatgtgtgtgccatacatattcatagttacgaattgaagatgatggatggaaatatcgatctaggataggtatacatgttgatgcgggttttactgatgcatatacagagatgctttttgttcgcttggttgtgatgatgtggtgtggttgggcggtcgttcattcgttctagatcggagtagaatactgtttcaaactacctggtgtatttattaattttggaactgtatgtgtgtgtcatacatcttcatagttacgagtttaagatggatggaaatatcgatctaggataggtatacatgttgatgtgggttttactgatgcatatacatgatggcatatgcagcatctattcatatgctctaaccttgagtacctatctattataataaacaagtatgttttataattattttgatcttgatatacttggatgatggcatatccagcagctatatgtggatttttttagccctgccttcatacgctatttatttgcttggtactgtttcttttgtcgatgctcaccctgttgtttggtgttacttctgcaggatcctctaagtagcagccatgaacaagaacaacaccaagctgagcacccgcgccctgccgagcttcatcgactacttcaacggcatctacggcttcgccaccggcatcaaggacatcatgaacatgatcttcaagaccgacaccggcggcgacctgaccctggacgagatcctgaagaaccagcagctgctgaacgacatcagcggcaagctggacggcgtgaacggcagcctgaacgacctgatcgcccagggcaacctgaacaccgagctgagcaaggagatccttaagatcgccaacgagcagaaccaggtgctgaacgacgtgaacaacaagctggacgccatcaacaccatgctgcgcgtgtacctgccgaagatcaccagcatgctgagcgacgtgattaagcagaactacgccctgagcctgcagatcgagtacctgagcaagcagctgcaggagatcagcgacaagctggacatcatcaacgtgaacgtcctgatcaacagcaccctgaccgagatcaccccggcctaccagcgcatcaagtacgtgaacgagaagttcgaagagctgaccttcgccaccgagaccagcagcaaggtgaagaaggacggcagcccggccgacatcctggacgagctgaccgagctgaccgagctggcgaagagcgtgaccaagaacgacgtggacggcttcgagttctacctgaacaccttccacgacgtgatggtgggcaacaacctgttcggccgcagcgccctgaagaccgccagcgagctgatcaccaaggagaacgtgaagaccagcggcagcgaggtgggcaacgtgtacaacttcctgatcgtgctgaccgccctgcaggcccaggccttcctgaccctgaccacctgtcgcaagctgctgggcctggccgacatcgactacaccagcatcatgaacgagcacttgaacaaggagaaggaggagttccgcgtgaacatcctgccgaccctgagcaacaccttcagcaacccgaactacgccaaggtgaagggcagcgacgaggacgccaagatgatcgtggaggctaagccgggccacgcgttgatcggcttcgagatcagcaacgacagcatcaccgtgctgaaggtgtacgaggccaagctgaagcagaactaccaggtggacaaggacagcttgagcgaggtgatctacggcgacatggacaagctgctgtgtccggaccagagcgagcaaatctactacaccaacaacatcgtgttcccgaacgagtacgtgatcaccaagatcgacttcaccaagaagatgaagaccctgcgctacgaggtgaccgccaacttctacgacagcagcaccggcgagatcgacctgaacaagaagaaggtggagagcagcgaggccgagtaccgcaccctgagcgcgaacgacgacggcgtctacatgccactgggcgtgatcagcgagaccttcctgaccccgatcaacggctttggcctgcaggccgacgagaacagccgcctgatcaccctgacctgtaagagctacctgcgcgagctgctgctagccaccgacctgagcaacaaggagaccaagctgatcgtgccaccgagcggcttcatcagcaacatcgtggagaacggcagcatcgaggaggacaacctggagccgtggaaggccaacaacaagaacgcctacgtcgaccacaccggcggcgtgaacggcaccaaggccctgtacgtgcacaaggacggcggcatcagccagttcatcggcgacaagctgaagccgaagaccgagtacgtgatccagtacaccgtgaagggcaagccatcgattcacctgaaggacgagaacaccggctacatccactacgaggacaccaacaacaacctggaggactaccagaccatcaacaagcgcttcaccaccggcaccgacctgaagggcgtgtacctgatcctgaagagccagaacggcgacgaggcctggggcgacaacttcatcatcctggagatcagcccgagcgagaagctgctgagcccggagctgatcaacaccaacaactggaccagcaccggcagcaccaacatcagcggcaacaccctgaccctgtaccagggcggccgcggcatcctgaagcagaacctgcagctggacagcttcagcacctaccgcgtgtacttcagcgtgagcggcgacgccaacgtgcgcatccgcaactcccgcgaggtgctgttcgagaagaggtacatgagcggcgccaaggacgtgagcgagatgttcaccaccaagttcgagaaggacaacttctacatcgagctgagccagggcaacaacctgtacggcggcccgatcgtgcacttctacgacgtgagcatcaagtaggagctctgtccctcactacgtccggttcagttgcctctaatcctatccctcgccacgttatctgcacaaagtggagtagtcagtcatcgatcaggaaccagacaccagacttttattcatacagtgaagtgaagtgaagtgcagtgcagtgagttgctggtttttgtacaacttagtatgtatttgtatttgtaaaatacttctatcaataaaatttctaattcctaaaaccaaaatccaggctacacggaccgcgatcgcttaattaagcttgcatgcctgcagtgcagcgtgacccggtcgtgcccctctctagagataatgagcattgcatgtctaagttataaaaaattaccacatattttttttgtcacacttgtttgaagtgcagtttatctatctttatacatatatttaaactttactctacgaataatataatctatagtactacaataatatcagtgttttagagaatcatataaatgaacagttagacatggtctaaaggacaattgagtattttgacaacaggactctacagttttatctttttagtgtgcatgtgttctcctttttttttgcaaatagcttcacctatataatacttcatccattttattagtacatccatttagggtttagggttaatggtttttatagactaatttttttagtacatctattttattctattttagcctctaaattaagaaaactaaaactctattttagtttttttatttaataatttagatataaaatagaataaaataaagtgactaaaaattaaacaaataccctttaagaaattaaaaaaactaaggaaacatttttcttgtttcgagtagataatgccagcctgttaaacgccgccgacgagtctaacggacaccaaccagcgaaccagcagcgtcgcgtcgggccaagcgaagcagacggcacggcatctctgtcgctgcctctggacccctctcgagagttccgctccaccgttggacttgctccgctgtcggcatccagaaattgcgtggcggagcggcagacgtgagccggcacggcaggcggcctcctcctcctctcacggcaccggcagctacgggggattcctttcccaccgctccttcgctttcccttcctcgcccgccgtaataaatagacaccccctccacaccctctttccccaacctcgtgttgttcggagcgcacacacacacaaccagatctcccccaaatccacccgtcggcacctccgcttcaaggtacgccgctcgtcctccccccccccccctctctaccttctctagatcggcgttccggtccatagttagggcccggtagttctacttctgttcatgtttgtgttagatccgtgtttgtgttagatccgtgctgttagcgttcgtacacggatgcgacctgtacgtcagacacgttctgattgctaacttgccagtgtttctctttggggaatcctgggatggctctagccgttccgcagacgggatcgatttcatgattttttttgtttcgttgcatagggtttggtttgcccttttcctttatttcaatatatgccgtgcacttgtttgtcgggtcatcttttcatgcttttttttgtcttggttgtgatgatgtggtctggttgggcggtcgttctagatcggagtagaattctgtttcaaactacctggtggatttattaattttggatctgtatgtgtgtgccatacatattcatagttacgaattgaagatgatggatggaaatatcgatctaggataggtatacatgttgatgcgggttttactgatgcatatacagagatgctttttgttcgcttggttgtgatgatgtggtgtggttgggcggtcgttcattcgttctagatcggagtagaatactgtttcaaactacctggtgtatttattaattttggaactgtatgtgtgtgtcatacatcttcatagttacgagtttaagatggatggaaatatcgatctaggataggtatacatgttgatgtgggttttactgatgcatatacatgatggcatatgcagcatctattcatatgctctaaccttgagtacctatctattataataaacaagtatgttttataattattttgatcttgatatacttggatgatggcatatgcagcagctatatgtggatttttttagccctgccttcatacgctatttatttgcttggtactgtttcttttgtcgatgctcaccctgttgtttggtgttacttctgcagggatctccgatcatgcaaaaactcattaactcagtgcaaaactatgcctggggcagcaaaacggcgttgactgaactttatggtatggaaaatccgtccagccagccgatggccgagctgtggatgggcgcacatccgaaaagcagttcacgagtgcagaatgccgccggagatatcgtttcactgcgtgatgtgattgagagtgataaatcgactctgctcggagaggccgttgccaaacgctttggcgaactgcctttcctgttcaaagtattatgcgcagcacagccactctccattcaggttcatccaaacaaacacaattctgaaatcggttttgccaaagaaaatgccgcaggtatcccgatggatgccgccgagcgtaactataaagatcctaaccacaagccggagctggtttttgcgctgacgcctttccttgcgatgaacgcgtttcgtgaattttccgagattgtctccctactccagccggtcgcaggtgcacatccggcgattgctcactttttacaacagcctgatgccgaacgtttaagcgaactgttcgccagcctgttgaatatgcagggtgaagaaaaatcccgcgcgctggcgattttaaaatcggccctcgatagccagcagggtgaaccgtggcaaacgattcgtttaatttctgaattttacccggaagacagcggtctgttctccccgctattgctgaatgtggtgaaattgaaccctggcgaagcgatgttcctgttcgctgaaacaccgcacgcttacctgcaaggcgtggcgctggaagtgatggcaaactccgataacgtgctgcgtgcgggtctgacgcctaaatacattgatattccggaactggttgccaatgtgaaattcgaagccaaaccggctaaccagttgttgacccagccggtgaaacaaggtgcagaactggacttcccgattccagtggatgattttgccttctcgctgcatgaccttagtgataaagaaaccaccattagccagcagagtgccgccattttgttctgcgtcgaaggcgatgcaacgttgtggaaaggttctcagcagttacagcttaaaccgggtgaatcagcgtttattgccgccaacgaatcaccggtgactgtcaaaggccacggccgtttagcgcgtgtttacaacaagctgtaagagcttactgaaaaaattaacatctcttgctaagctgggtcatgggtcgtttaagctgccgatgtgcctgcgtcgtctggtgccctctctccatatggaggttgtcaaagtatctgctgttcgtgtcatgagtcgtgtcagtgttggtttaataatggaccggttgtgttgtgtgtgcgtactacccagaactatgacaaatcatgaataagtttgatgtttgaaattaaagcctgtgctcattatgttctgtctttcagttgtctcctaatatttgcctccaggtactggctatctaccgtttcttacttaggaggtgtttgaatgcactaaaactaatagttagtggctaaaattagttaaaacatccaaacaccatagctaatagttgaactattagctatttttggaaaattagttaatagtgaggtagttatttgttagctagctaattcaactaacaatttttagccaactaacaattagtttcagtgcattcaaacacccccttaatgttaacgtggttctatctaccgtctcctaatatatggttgattgttcggtttgttgctatgctattgggttctgattgctgctagttcttgctgaatccagaagttctcgtagtatagctcagattcatattatttatttgagtgataagtgatccaggttattactatgttagctaggttttttttacaaggataaattatctgtgatcataattcttatgaaagctttatgtttcctggaggcagtggcatgcaatgcatgacagcaacttgatcacaccagctgaggtagatacggtaacaaggttcttaaatctgttcaccaaatcattggagaacacacatacacattcttgccagtcttggttagagaaatttcatgacaaaatgccaaagctgtcttgactcttcacttttggccatgagtcgtgacttagtttggtttaatggaccggttctcctagcttgttctactcaaaactgttgttgatgcgaataagttgtgatggttgatctctggattttgttttgctctcaatagtggacgagattagatagcctgcaggcccgggggcgcgccctaattagctaacggccaggatcgccgcgtgagcctttagcaactagctagattaattaacgcaatctgttattaagttgtctaagcgtcaatttgtttacaccacaatatatcctgccaccagccagccaacagctccccgaccggcagctcggcacaaaatcaccactcgatacaggcagcccatcagaattaattctcatgtttgacagcttatcatcgactgcacggtgcaccaatgcttctggcgtcaggcagccatcggaagctgtggtatggctgtgcaggtcgtaaatcactgcataattcgtgtcgctcaaggcgcactcccgttctggataatgttttttgcgccgacatcataacggttctggcaaatattctgaaatgagctgttgacaattaatcatccggctcgtataatgtgtggaattgtgagcggataacaatttcacacaggaaacagaccatgagggaagcgttgatcgccgaagtatcgactcaactatcagaggtagttggcgtcatcgagcgccatctcgaaccgacgttgctggccgtacatttgtacggctccgcagtggatggcggcctgaagccacacagtgatattgatttgctggttacggtgaccgtaaggcttgatgaaacaacgcggcgagctttgatcaacgaccttttggaaacttcggcttcccctggagagagcgagattctccgcgctgtagaagtcaccattgttgtgcacgacgacatcattccgtggcgttatccagctaagcgcgaactgcaatttggagaatggcagcgcaatgacattcttgcaggtatcttcgagccagccacgatcgacattgatctggctatcttgctgacaaaagcaagagaacatagcgttgccttggtaggtccagcggcggaggaactctttgatccggttcctgaacaggatctatttgaggcgctaaatgaaaccttaacgctatggaactcgccgcccgactgggctggcgatgagcgaaatgtagtgcttacgttgtcccgcatttggtacagcgcagtaaccggcaaaatcgcgccgaaggatgtcgctgccgactgggcaatggagcgcctgccggcccagtatcagcccgtcatacttgaagctaggcaggcttatcttggacaagaagatcgcttggcctcgcgcgcagatcagttggaagaatttgttcactacgtgaaaggcgagatcaccaaagtagtcggcaaataaagctctagtggatctccgtacccagggatctggctcgcggcggacgcacgacgccggggcgagaccataggcgatctcctaaatcaatagtagctgtaacctcgaagcgtttcacttgtaacaacgattgagaatttttgtcataaaattgaaatacttggttcgcatttttgtcatccgcggtcagccgcaattctgacgaactgcccatttagctggagatgattgtacatccttcacgtgaaaatttctcaagcgctgtgaacaagggttcagattttagattgaaaggtgagccgttgaaacacgttcttcttgtcgatgacgacgtcgctatgcggcatcttattattgaataccttacgatccacgccttcaaagtgaccgcggtagccgacagcacccagttcacaagagtactctcttccgcgacggtcgatgtcgtggttgttgatctagatttaggtcgtgaagatgggctcgagatcgttcgtaatctggcggcaaagtctgatattccaatcataattatcagtggcgaccgccttgaggagacggataaagttgttgcactcgagctaggagcaagtgattttatcgctaagccgttcagtatcagagagtttctagcacgcattcgggttgccttgcgcgtgcgccccaacgttgtccgctccaaagaccgacggtctttttgttttactgactggacacttaatctcaggcaacgtcgcttgatgtccgaagctggcggtgaggtgaaacttacggcaggtgagttcaatcttctcctcgcgtttttagagaaaccccgcgacgttctatcgcgcgagcaacttctcattgccagtcgagtacgcgacgaggaggtttatgacaggagtatagatgttctcattttgaggctgcgccgcaaacttgaggcagatccgtcaagccctcaactgataaaaacagcaagaggtgccggttatttctttgacgcggacgtgcaggtttcgcacggggggacgatggcagcctgagccaattcccagatccccgaggaatcggcgtgagcggtcgcaaaccatccggcccggtacaaatcggcgcggcgctgggtgatgacctggtggagaagttgaaggccgcgcaggccgcccagcggcaacgcatcgaggcagaagcacgccccggtgaatcgtggcaagcggccgctgatcgaatccgcaaagaatcccggcaaccgccggcagccggtgcgccgtcgattaggaagccgcccaagggcgacgagcaaccagattttttcgttccgatgctctatgacgtgggcacccgcgatagtcgcagcatcatggacgtggccgttttccgtctgtcgaagcgtgaccgacgagctggcgaggtgatccgctacgagcttccagacgggcacgtagaggtttccgcagggccggccggcatggccagtgtgtgggattacgacctggtactgatggcggtttcccatctaaccgaatccatgaaccgataccgggaagggaagggagacaagcccggccgcgtgttccgtccacacgttgcggacgtactcaagttctgccggcgagccgatggcggaaagcagaaagacgacctggtagaaacctgcattcggttaaacaccacgcacgttgccatgcagcgtacgaagaaggccaagaacggccgcctggtgacggtatccgagggtgaagccttgattagccgctacaagatcgtaaagagcgaaaccgggcggccggagtacatcgagatcgagctggctgattggatgtaccgcgagatcacagaaggcaagaacccggacgtgctgacggttcaccccgattactttttgatcgatcccggcatcggccgttttctctaccgcctggcacgccgcgccgcaggcaaggcagaagccagatggttgttcaagacgatctacgaacgcagtggcagcgccggagagttcaagaagttctgtttcaccgtgcgcaagctgatcgggtcaaatgacctgccggagtacgatttgaaggaggaggcggggcaggctggcccgatcctagtcatgcgctaccgcaacctgatcgagggcgaagcatccgccggttcctaatgtacggagcagatgctagggcaaattgccctagcaggggaaaaaggtcgaaaaggtctctttcctgtggatagcacgtacattgggaacccaaagccgtacattgggaaccggaacccgtacattgggaacccaaagccgtacattgggaaccggtcacacatgtaagtgactgatataaaagagaaaaaaggcgatttttccgcctaaaactctttaaaacttattaaaactcttaaaacccgcctggcctgtgcataactgtctggccagcgcacagccgaagagctgcaaaaagcgcctacccttcggtcgctgcgctccctacgccccgccgcttcgcgtcggcctatcgcggccgctggccgctcaaaaatggctggcctacggccaggcaatctaccagggcgcggacaagccgcgccgtcgccactcgaccgccggcgctgaggtctgcctcgtgaagaaggtgttgctgactcataccaggcctgaatcgccccatcatccagccagaaagtgagggagccacggttgatgagagctttgttgtaggtggaccagttggtgattttgaacttttgctttgccacggaacggtctgcgttgtcgggaagatgcgtgatctgatccttcaactcagcaaaagttcgatttattcaacaaagccgccgtcccgtcaagtcagcgtaatgctctgccagtgttacaaccaattaaccaattctgattagaaaaactcatcgagcatcaaatgaaactgcaatttattcatatcaggattatcaataccatatttttgaaaaagccgtttctgtaatgaaggagaaaactcaccgaggcagttccataggatggcaagatcctggtatcggtctgcgattccgactcgtccaacatcaatacaacctattaatttcccctcgtcaaaaataaggttatcaagtgagaaatcaccatgagtgacgactgaatccggtgagaatggcaaaagctctgcattaatgaatcggccaacgcgcggggagaggcggtttgcgtattgggcgctcttccgcttcctcgctcactgactcgctgcgctcggtcgttcggctgcggcgagcggtatcagctcactcaaaggcggtaatacggttatccacagaatcaggggataacgcaggaaagaacatgtgagcaaaaggccagcaaaaggccaggaaccgtaaaaaggccgcgttgctggcgtttttccataggctccgcccccctgacgagcatcacaaaaatcgacgctcaagtcagaggtggcgaaacccgacaggactataaagataccaggcgtttccccctggaagctccctcgtgcgctctcctgttccgaccctgccgcttaccggatacctgtccgcctttctcccttcgggaagcgtggcgctttctcatagctcacgctgtaggtatctcagttcggtgtaggtcgttcgctccaagctgggctgtgtgcacgaaccccccgttcagcccgaccgctgcgccttatccggtaactatcgtcttgagtccaacccggtaagacacgacttatcgccactggcagcagccactggtaacaggattagcagagcgaggtatgtaggcggtgctacagagttcttgaagtggtggcctaactacggctacactagaagaacagtatttggtatctgcgctctgctgaagccagttaccttcggaaaaagagttggtagctcttgatccggcaaacaaaccaccgctggtagcggtggtttttttgtttgcaagcagcagattacgcgcagaaaaaaaggatctcaagaagatcctttgatcttttctacggggtctgacgctcagtggaacgaaaactcacgttaagggattttggtcatgagattatcaaaaaggatcttcacctagatccttttgatccggaatta

SEQ ID NO: 107 - DNA, 14500 bp, Artificial Sequence
  23712 vector
attcctgtggttggcatgcacatacaaatggacgaacggataaaccttttcacgcccttttaaatatccgattattctaataaacgctcttttctcttaggtttacccgccaatatatcctgtcaaacactgatagtttaaactggcactagcctaacggtgttgactaactaggccgcttccctaattagctaacccgggggcgcgccgggaccctaattagctaaggtacctgcagtgcagcgtgacccggtcgtgcccctctctagagataatgagcattgcatgtctaagttataaaaaattaccacatattttttttgtcacacttgtttgaagtgcagtttatctatctttatacatatatttaaactttactctacgaataatataatctatagtactacaataatatcagtgttttagagaatcatataaatgaacagttagacatggtctaaaggacaattgagtattttgacaacaggactctacagttttatctttttagtgtgcatgtgttctcctttttttttgcaaatagcttcacctatataatacttcatccattttattagtacatccatttagggtttagggttaatggtttttatagactaatttttttagtacatctattttattctattttagcctctaaattaagaaaactaaaactctattttagtttttttatttaataatttagatataaaatagaataaaataaagtgactaaaaattaaacaaataccctttaagaaattaaaaaaactaaggaaacatttttcttgtttcgagtagataatgccagcctgttaaacgccgtcgacgagtctaacggacaccaaccagcgaaccagcagcgtcgcgtcgggccaagcgaagcagacggcacggcatctctgtcgctgcctctggacccctctcgagagttccgctccaccgttggacttgctccgctgtcggcatccagaaattgcgtggcggagcggcagacgtgagccggcacggcaggcggcctcctcctcctctcacggcaccggcagctacgggggattcctttcccaccgctccttcgctttcccttcctcgcccgccgtaataaatagacaccccctccacaccctctttccccaacctcgtgttgttcggagcgcacacacacacaaccagatctcccccaaatccacccgtcggcacctccgcttcctaggtacgccgctcgtcctccccccccccccctctctaccttctctagatcggcgttccggtccatagttagggcccggtagttctacttctgttcatgtttgtgttagatccgtgtttgtgttagatccgtgctgctagcgttcgtacacggatgcgacctgtacgtcagacacgttctgattgctaacttgccagtgtttctctttggggaatcctgggatggctctagccgttccgcagacgggatcgatttcatgattttttttgtttcgttgcatagggtttggtttgcccttttcctttatttcaatatatgccgtgcacttgtttgtcgggtcatcttttcatgcttttttttgtcttggttgtgatgatgtggtctggttgggcggtcgttctagatcggagtagaattctgtttcaaactacctggtggatttattaattttggatctgtatgtgtgtgccatacatattcatagttacgaattgaagatgatggatggaaatatcgatctaggataggtatacatgttgatgcgggttttactgatgcatatacagagatgctttttgttcgcttggttgtgatgatgtggtgtggttgggcggtcgttcattcgttctagatcggagtagaatactgtttcaaactacctggtgtatttattaattttggaactgtatgtgtgtgtcatacatcttcatagttacgagtttaagatggatggaaatatcgatctaggataggtatacatgttgatgtgggttttactgatgcatatacatgatggcatatgcagcatctattcatatgctctaaccttgagtacctatctattataataaacaagtatgttttataattattttgatcttgatatacttggatgatggcatatccagcagctatatgtggatttttttagccctgccttcatacgctatttatttgcttggtactgtttcttttgtcgatgctcaccctgttgtttggtgttacttctgcaggatcctctaagtagcagccatgaacaagaacaacaccaagctgagcacccgcgccctgccgagcttcatcgactacttcaacggcatctacggcttcgccaccggcatcaaggacatcatgaacatgatcttcaagaccgacaccggcggcgacctgaccctggacgagatcctgaagaaccagcagctgctgaacgacatcagcggcaagctggacggcgtgaacggcagcctgaacgacctgatcgcccagggcaacctgaacaccgagctgagcaaggagatccttaagatcgccaacgagcagaaccaggtgctgaacgacgtgaacaacaagctggacgccatcaacaccatgctgcgcgtgtacctgccgaagatcaccagcatgctgagcgacgtgattaagcagaactacgccctgagcctgcagatcgagtacctgagcaagcagctgcaggagatcagcgacaagctggacatcatcaacgtgaacgtcctgatcaacagcaccctgaccgagatcaccccggcctaccagcgcatcaagtacgtgaacgagaagttcgaagagctgaccttcgccaccgagaccagcagcaaggtgaagaaggacggcagcccggccgacatcctggacgagctgaccgagctgaccgagctggcgaagagcgtgaccaagaacgacgtggacggcttcgagttctacctgaacaccttccacgacgtgatggtgggcaacaacctgttcggccgcagcgccctgaagaccgccagcgagctgatcaccaaggagaacgtgaagaccagcggcagcgaggtgggcaacgtgtacaacttcctgatcgtgctgaccgccctgcaggcccaggccttcctgaccctgaccacctgtcgcaagctgctgggcctggccgacatcgactacaccagcatcatgaacgagcacttgaacaaggagaaggaggagttccgcgtgaacatcctgccgaccctgagcaacaccttcagcaacccgaactacgccaaggtgaagggcagcgacgaggacgccaagatgatcgtggaggctaagccgggccacgcgttgatcggcttcgagatcagcaacgacagcatcaccgtgctgaaggtgtacgaggccaagctgaagcagaactaccaggtggacaaggacagcttgagcgaggtgatctacggcgacatggacaagctgctgtgtccggaccagagcgagcaaatctactacaccaacaacatcgtgttcccgaacgagtacgtgatcaccaagatcgacttcaccaagaagatgaagaccctgcgctacgaggtgaccgccaacttctacgacagcagcaccggcgagatcgacctgaacaagaagaaggtggagagcagcgaggccgagtaccgcaccctgagcgcgaacgacgacggcgtctacatgccactgggcgtgatcagcgagaccttcctgaccccgatcaacggctttggcctgcaggccgacgagaacagccgcctgatcaccctgacctgtaagagctacctgcgcgagctgctgctagccaccgacctgagcaacaaggagaccaagctgatcgtgccaccgagcggcttcatcagcaacatcgtggagaacggcagcatcgaggaggacaacctggagccgtggaaggccaacaacaagaacgcctacgtcgaccacaccggcggcgtgaacggcaccaaggccctgtacgtgcacaaggacggcggcatcagccagttcatcggcgacaagctgaagccgaagaccgagtacgtgatccagtacaccgtgaagggcaagccatcgattcacctgaaggacgagaacaccggctacatccactacgaggacaccaacaacaacctggaggactaccagaccatcaacaagcgcttcaccaccggcaccgacctgaagggcgtgtacctgatcctgaagagccagaacggcgacgaggcctggggcgacaacttcatcatcctggagatcagcccgagcgagaagctgctgagcccggagctgatcaacaccaacaactggaccagcaccggcagcaccaacatcagcggcaacaccctgaccctgtaccagggcggccgcggcatcctgaagcagaacctgcagctggacagcttcagcacctaccgcgtgtacttcagcgtgagcggcgacgccaacgtgcgcatccgcaactcccgcgaggtgctgttcgagaagaggtacatgagcggcgccaaggacgtgagcgagatgttcaccaccaagttcgagaaggacaacttctacatcgagctgagccagggcaacaacctgtacggcggcccgatcgtgcacttctacgacgtgagcatcaagtaggagctctatacgcacacacatgttgagatattagaggaaactgaagaattacgccacattatctgcacaaagtggagtagtcagtcatcgatcaggaaccagacaccagacttttattcatacagtgaagtgaagtgaagtgcagtgcagtgagttgctggtttttgtacaacttagtatgtatttgtatttgtaaaatacttctatcaataaaatttctaattcctaaaaccaaaatccaggctacacggaccgcgatcgcttaattaagcttgcatgcctgcagtgcagcgtgacccggtcgtgcccctctctagagataatgagcattgcatgtctaagttataaaaaattaccacatattttttttgtcacacttgtttgaagtgcagtttatctatctttatacatatatttaaactttactctacgaataatataatctatagtactacaataatatcagtgttttagagaatcatataaatgaacagttagacatggtctaaaggacaattgagtattttgacaacaggactctacagttttatctttttagtgtgcatgtgttctcctttttttttgcaaatagcttcacctatataatacttcatccattttattagtacatccatttagggtttagggttaatggtttttatagactaatttttttagtacatctattttattctattttagcctctaaattaagaaaactaaaactctattttagtttttttatttaataatttagatataaaatagaataaaataaagtgactaaaaattaaacaaataccctttaagaaattaaaaaaactaaggaaacatttttcttgtttcgagtagataatgccagcctgttaaacgccgccgacgagtctaacggacaccaaccagcgaaccagcagcgtcgcgtcgggccaagcgaagcagacggcacggcatctctgtcgctgcctctggacccctctcgagagttccgctccaccgttggacttgctccgctgtcggcatccagaaattgcgtggcggagcggcagacgtgagccggcacggcaggcggcctcctcctcctctcacggcaccggcagctacgggggattcctttcccaccgctccttcgctttcccttcctcgcccgccgtaataaatagacaccccctccacaccctctttccccaacctcgtgttgttcggagcgcacacacacacaaccagatctcccccaaatccacccgtcggcacctccgcttcaaggtacgccgctcgtcctccccccccccccctctctaccttctctagatcggcgttccggtccatagttagggcccggtagttctacttctgttcatgtttgtgttagatccgtgtttgtgttagatccgtgctgttagcgttcgtacacggatgcgacctgtacgtcagacacgttctgattgctaacttgccagtgtttctctttggggaatcctgggatggctctagccgttccgcagacgggatcgatttcatgattttttttgtttcgttgcatagggtttggtttgcccttttcctttatttcaatatatgccgtgcacttgtttgtcgggtcatcttttcatgcttttttttgtcttggttgtgatgatgtggtctggttgggcggtcgttctagatcggagtagaattctgtttcaaactacctggtggatttattaattttggatctgtatgtgtgtgccatacatattcatagttacgaattgaagatgatggatggaaatatcgatctaggataggtatacatgttgatgcgggttttactgatgcatatacagagatgctttttgttcgcttggttgtgatgatgtggtgtggttgggcggtcgttcattcgttctagatcggagtagaatactgtttcaaactacctggtgtatttattaattttggaactgtatgtgtgtgtcatacatcttcatagttacgagtttaagatggatggaaatatcgatctaggataggtatacatgttgatgtgggttttactgatgcatatacatgatggcatatgcagcatctattcatatgctctaaccttgagtacctatctattataataaacaagtatgttttataattattttgatcttgatatacttggatgatggcatatgcagcagctatatgtggatttttttagccctgccttcatacgctatttatttgcttggtactgtttcttttgtcgatgctcaccctgttgtttggtgttacttctgcagggatctccgatcatgcaaaaactcattaactcagtgcaaaactatgcctggggcagcaaaacggcgttgactgaactttatggtatggaaaatccgtccagccagccgatggccgagctgtggatgggcgcacatccgaaaagcagttcacgagtgcagaatgccgccggagatatcgtttcactgcgtgatgtgattgagagtgataaatcgactctgctcggagaggccgttgccaaacgctttggcgaactgcctttcctgttcaaagtattatgcgcagcacagccactctccattcaggttcatccaaacaaacacaattctgaaatcggttttgccaaagaaaatgccgcaggtatcccgatggatgccgccgagcgtaactataaagatcctaaccacaagccggagctggtttttgcgctgacgcctttccttgcgatgaacgcgtttcgtgaattttccgagattgtctccctactccagccggtcgcaggtgcacatccggcgattgctcactttttacaacagcctgatgccgaacgtttaagcgaactgttcgccagcctgttgaatatgcagggtgaagaaaaatcccgcgcgctggcgattttaaaatcggccctcgatagccagcagggtgaaccgtggcaaacgattcgtttaatttctgaattttacccggaagacagcggtctgttctccccgctattgctgaatgtggtgaaattgaaccctggcgaagcgatgttcctgttcgctgaaacaccgcacgcttacctgcaaggcgtggcgctggaagtgatggcaaactccgataacgtgctgcgtgcgggtctgacgcctaaatacattgatattccggaactggttgccaatgtgaaattcgaagccaaaccggctaaccagttgttgacccagccggtgaaacaaggtgcagaactggacttcccgattccagtggatgattttgccttctcgctgcatgaccttagtgataaagaaaccaccattagccagcagagtgccgccattttgttctgcgtcgaaggcgatgcaacgttgtggaaaggttctcagcagttacagcttaaaccgggtgaatcagcgtttattgccgccaacgaatcaccggtgactgtcaaaggccacggccgtttagcgcgtgtttacaacaagctgtaagagcttactgaaaaaattaacatctcttgctaagctgggtcatgggtcgtttaagctgccgatgtgcctgcgtcgtctggtgccctctctccatatggaggttgtcaaagtatctgctgttcgtgtcatgagtcgtgtcagtgttggtttaataatggaccggttgtgttgtgtgtgcgtactacccagaactatgacaaatcatgaataagtttgatgtttgaaattaaagcctgtgctcattatgttctgtctttcagttgtctcctaatatttgcctccaggtactggctatctaccgtttcttacttaggaggtgtttgaatgcactaaaactaatagttagtggctaaaattagttaaaacatccaaacaccatagctaatagttgaactattagctatttttggaaaattagttaatagtgaggtagttatttgttagctagctaattcaactaacaatttttagccaactaacaattagtttcagtgcattcaaacacccccttaatgttaacgtggttctatctaccgtctcctaatatatggttgattgttcggtttgttgctatgctattgggttctgattgctgctagttcttgctgaatccagaagttctcgtagtatagctcagattcatattatttatttgagtgataagtgatccaggttattactatgttagctaggttttttttacaaggataaattatctgtgatcataattcttatgaaagctttatgtttcctggaggcagtggcatgcaatgcatgacagcaacttgatcacaccagctgaggtagatacggtaacaaggttcttaaatctgttcaccaaatcattggagaacacacatacacattcttgccagtcttggttagagaaatttcatgacaaaatgccaaagctgtcttgactcttcacttttggccatgagtcgtgacttagtttggtttaatggaccggttctcctagcttgttctactcaaaactgttgttgatgcgaataagttgtgatggttgatctctggattttgttttgctctcaatagtggacgagattagatagcctgcaggcccgggggcgcgccctaattagctaacggccaggatcgccgcgtgagcctttagcaactagctagattaattaacgcaatctgttattaagttgtctaagcgtcaatttgtttacaccacaatatatcctgccaccagccagccaacagctccccgaccggcagctcggcacaaaatcaccactcgatacaggcagcccatcagaattaattctcatgtttgacagcttatcatcgactgcacggtgcaccaatgcttctggcgtcaggcagccatcggaagctgtggtatggctgtgcaggtcgtaaatcactgcataattcgtgtcgctcaaggcgcactcccgttctggataatgttttttgcgccgacatcataacggttctggcaaatattctgaaatgagctgttgacaattaatcatccggctcgtataatgtgtggaattgtgagcggataacaatttcacacaggaaacagaccatgagggaagcgttgatcgccgaagtatcgactcaactatcagaggtagttggcgtcatcgagcgccatctcgaaccgacgttgctggccgtacatttgtacggctccgcagtggatggcggcctgaagccacacagtgatattgatttgctggttacggtgaccgtaaggcttgatgaaacaacgcggcgagctttgatcaacgaccttttggaaacttcggcttcccctggagagagcgagattctccgcgctgtagaagtcaccattgttgtgcacgacgacatcattccgtggcgttatccagctaagcgcgaactgcaatttggagaatggcagcgcaatgacattcttgcaggtatcttcgagccagccacgatcgacattgatctggctatcttgctgacaaaagcaagagaacatagcgttgccttggtaggtccagcggcggaggaactctttgatccggttcctgaacaggatctatttgaggcgctaaatgaaaccttaacgctatggaactcgccgcccgactgggctggcgatgagcgaaatgtagtgcttacgttgtcccgcatttggtacagcgcagtaaccggcaaaatcgcgccgaaggatgtcgctgccgactgggcaatggagcgcctgccggcccagtatcagcccgtcatacttgaagctaggcaggcttatcttggacaagaagatcgcttggcctcgcgcgcagatcagttggaagaatttgttcactacgtgaaaggcgagatcaccaaagtagtcggcaaataaagctctagtggatctccgtacccagggatctggctcgcggcggacgcacgacgccggggcgagaccataggcgatctcctaaatcaatagtagctgtaacctcgaagcgtttcacttgtaacaacgattgagaatttttgtcataaaattgaaatacttggttcgcatttttgtcatccgcggtcagccgcaattctgacgaactgcccatttagctggagatgattgtacatccttcacgtgaaaatttctcaagcgctgtgaacaagggttcagattttagattgaaaggtgagccgttgaaacacgttcttcttgtcgatgacgacgtcgctatgcggcatcttattattgaataccttacgatccacgccttcaaagtgaccgcggtagccgacagcacccagttcacaagagtactctcttccgcgacggtcgatgtcgtggttgttgatctagatttaggtcgtgaagatgggctcgagatcgttcgtaatctggcggcaaagtctgatattccaatcataattatcagtggcgaccgccttgaggagacggataaagttgttgcactcgagctaggagcaagtgattttatcgctaagccgttcagtatcagagagtttctagcacgcattcgggttgccttgcgcgtgcgccccaacgttgtccgctccaaagaccgacggtctttttgttttactgactggacacttaatctcaggcaacgtcgcttgatgtccgaagctggcggtgaggtgaaacttacggcaggtgagttcaatcttctcctcgcgtttttagagaaaccccgcgacgttctatcgcgcgagcaacttctcattgccagtcgagtacgcgacgaggaggtttatgacaggagtatagatgttctcattttgaggctgcgccgcaaacttgaggcagatccgtcaagccctcaactgataaaaacagcaagaggtgccggttatttctttgacgcggacgtgcaggtttcgcacggggggacgatggcagcctgagccaattcccagatccccgaggaatcggcgtgagcggtcgcaaaccatccggcccggtacaaatcggcgcggcgctgggtgatgacctggtggagaagttgaaggccgcgcaggccgcccagcggcaacgcatcgaggcagaagcacgccccggtgaatcgtggcaagcggccgctgatcgaatccgcaaagaatcccggcaaccgccggcagccggtgcgccgtcgattaggaagccgcccaagggcgacgagcaaccagattttttcgttccgatgctctatgacgtgggcacccgcgatagtcgcagcatcatggacgtggccgttttccgtctgtcgaagcgtgaccgacgagctggcgaggtgatccgctacgagcttccagacgggcacgtagaggtttccgcagggccggccggcatggccagtgtgtgggattacgacctggtactgatggcggtttcccatctaaccgaatccatgaaccgataccgggaagggaagggagacaagcccggccgcgtgttccgtccacacgttgcggacgtactcaagttctgccggcgagccgatggcggaaagcagaaagacgacctggtagaaacctgcattcggttaaacaccacgcacgttgccatgcagcgtacgaagaaggccaagaacggccgcctggtgacggtatccgagggtgaagccttgattagccgctacaagatcgtaaagagcgaaaccgggcggccggagtacatcgagatcgagctggctgattggatgtaccgcgagatcacagaaggcaagaacccggacgtgctgacggttcaccccgattactttttgatcgatcccggcatcggccgttttctctaccgcctggcacgccgcgccgcaggcaaggcagaagccagatggttgttcaagacgatctacgaacgcagtggcagcgccggagagttcaagaagttctgtttcaccgtgcgcaagctgatcgggtcaaatgacctgccggagtacgatttgaaggaggaggcggggcaggctggcccgatcctagtcatgcgctaccgcaacctgatcgagggcgaagcatccgccggttcctaatgtacggagcagatgctagggcaaattgccctagcaggggaaaaaggtcgaaaaggtctctttcctgtggatagcacgtacattgggaacccaaagccgtacattgggaaccggaacccgtacattgggaacccaaagccgtacattgggaaccggtcacacatgtaagtgactgatataaaagagaaaaaaggcgatttttccgcctaaaactctttaaaacttattaaaactcttaaaacccgcctggcctgtgcataactgtctggccagcgcacagccgaagagctgcaaaaagcgcctacccttcggtcgctgcgctccctacgccccgccgcttcgcgtcggcctatcgcggccgctggccgctcaaaaatggctggcctacggccaggcaatctaccagggcgcggacaagccgcgccgtcgccactcgaccgccggcgctgaggtctgcctcgtgaagaaggtgttgctgactcataccaggcctgaatcgccccatcatccagccagaaagtgagggagccacggttgatgagagctttgttgtaggtggaccagttggtgattttgaacttttgctttgccacggaacggtctgcgttgtcgggaagatgcgtgatctgatccttcaactcagcaaaagttcgatttattcaacaaagccgccgtcccgtcaagtcagcgtaatgctctgccagtgttacaaccaattaaccaattctgattagaaaaactcatcgagcatcaaatgaaactgcaatttattcatatcaggattatcaataccatatttttgaaaaagccgtttctgtaatgaaggagaaaactcaccgaggcagttccataggatggcaagatcctggtatcggtctgcgattccgactcgtccaacatcaatacaacctattaatttcccctcgtcaaaaataaggttatcaagtgagaaatcaccatgagtgacgactgaatccggtgagaatggcaaaagctctgcattaatgaatcggccaacgcgcggggagaggcggtttgcgtattgggcgctcttccgcttcctcgctcactgactcgctgcgctcggtcgttcggctgcggcgagcggtatcagctcactcaaaggcggtaatacggttatccacagaatcaggggataacgcaggaaagaacatgtgagcaaaaggccagcaaaaggccaggaaccgtaaaaaggccgcgttgctggcgtttttccataggctccgcccccctgacgagcatcacaaaaatcgacgctcaagtcagaggtggcgaaacccgacaggactataaagataccaggcgtttccccctggaagctccctcgtgcgctctcctgttccgaccctgccgcttaccggatacctgtccgcctttctcccttcgggaagcgtggcgctttctcatagctcacgctgtaggtatctcagttcggtgtaggtcgttcgctccaagctgggctgtgtgcacgaaccccccgttcagcccgaccgctgcgccttatccggtaactatcgtcttgagtccaacccggtaagacacgacttatcgccactggcagcagccactggtaacaggattagcagagcgaggtatgtaggcggtgctacagagttcttgaagtggtggcctaactacggctacactagaagaacagtatttggtatctgcgctctgctgaagccagttaccttcggaaaaagagttggtagctcttgatccggcaaacaaaccaccgctggtagcggtggtttttttgtttgcaagcagcagattacgcgcagaaaaaaaggatctcaagaagatcctttgatcttttctacggggtctgacgctcagtggaacgaaaactcacgttaagggattttggtcatgagattatcaaaaaggatcttcacctagatccttttgatccggaatta

SEQ ID NO: 108 - DNA, 14510 bp, Artificial Sequence
  23713 vector
attcctgtggttggcatgcacatacaaatggacgaacggataaaccttttcacgcccttttaaatatccgattattctaataaacgctcttttctcttaggtttacccgccaatatatcctgtcaaacactgatagtttaaactggcactagcctaacggtgttgactaactaggccgcttccctaattagctaacccgggggcgcgccgggaccctaattagctaaggtacctgcagtgcagcgtgacccggtcgtgcccctctctagagataatgagcattgcatgtctaagttataaaaaattaccacatattttttttgtcacacttgtttgaagtgcagtttatctatctttatacatatatttaaactttactctacgaataatataatctatagtactacaataatatcagtgttttagagaatcatataaatgaacagttagacatggtctaaaggacaattgagtattttgacaacaggactctacagttttatctttttagtgtgcatgtgttctcctttttttttgcaaatagcttcacctatataatacttcatccattttattagtacatccatttagggtttagggttaatggtttttatagactaatttttttagtacatctattttattctattttagcctctaaattaagaaaactaaaactctattttagtttttttatttaataatttagatataaaatagaataaaataaagtgactaaaaattaaacaaataccctttaagaaattaaaaaaactaaggaaacatttttcttgtttcgagtagataatgccagcctgttaaacgccgtcgacgagtctaacggacaccaaccagcgaaccagcagcgtcgcgtcgggccaagcgaagcagacggcacggcatctctgtcgctgcctctggacccctctcgagagttccgctccaccgttggacttgctccgctgtcggcatccagaaattgcgtggcggagcggcagacgtgagccggcacggcaggcggcctcctcctcctctcacggcaccggcagctacgggggattcctttcccaccgctccttcgctttcccttcctcgcccgccgtaataaatagacaccccctccacaccctctttccccaacctcgtgttgttcggagcgcacacacacacaaccagatctcccccaaatccacccgtcggcacctccgcttcctagtatacgcacacacatgttgagatattagaggaaactgaagaattacgccacactaggtacgccgctcgtcctccccccccccccctctctaccttctctagatcggcgttccggtccatagttagggcccggtagttctacttctgttcatgtttgtgttagatccgtgtttgtgttagatccgtgctgctagcgttcgtacacggatgcgacctgtacgtcagacacgttctgattgctaacttgccagtgtttctctttggggaatcctgggatggctctagccgttccgcagacgggatcgatttcatgattttttttgtttcgttgcatagggtttggtttgcccttttcctttatttcaatatatgccgtgcacttgtttgtcgggtcatcttttcatgcttttttttgtcttggttgtgatgatgtggtctggttgggcggtcgttctagatcggagtagaattctgtttcaaactacctggtggatttattaattttggatctgtatgtgtgtgccatacatattcatagttacgaattgaagatgatggatggaaatatcgatctaggataggtatacatgttgatgcgggttttactgatgcatatacagagatgctttttgttcgcttggttgtgatgatgtggtgtggttgggcggtcgttcattcgttctagatcggagtagaatactgtttcaaactacctggtgtatttattaattttggaactgtatgtgtgtgtcatacatcttcatagttacgagtttaagatggatggaaatatcgatctaggataggtatacatgttgatgtgggttttactgatgcatatacatgatggcatatgcagcatctattcatatgctctaaccttgagtacctatctattataataaacaagtatgttttataattattttgatcttgatatacttggatgatggcatatccagcagctatatgtggatttttttagccctgccttcatacgctatttatttgcttggtactgtttcttttgtcgatgctcaccctgttgtttggtgttacttctgcaggatcctctaagtagcagccatgaacaagaacaacaccaagctgagcacccgcgccctgccgagcttcatcgactacttcaacggcatctacggcttcgccaccggcatcaaggacatcatgaacatgatcttcaagaccgacaccggcggcgacctgaccctggacgagatcctgaagaaccagcagctgctgaacgacatcagcggcaagctggacggcgtgaacggcagcctgaacgacctgatcgcccagggcaacctgaacaccgagctgagcaaggagatccttaagatcgccaacgagcagaaccaggtgctgaacgacgtgaacaacaagctggacgccatcaacaccatgctgcgcgtgtacctgccgaagatcaccagcatgctgagcgacgtgattaagcagaactacgccctgagcctgcagatcgagtacctgagcaagcagctgcaggagatcagcgacaagctggacatcatcaacgtgaacgtcctgatcaacagcaccctgaccgagatcaccccggcctaccagcgcatcaagtacgtgaacgagaagttcgaagagctgaccttcgccaccgagaccagcagcaaggtgaagaaggacggcagcccggccgacatcctggacgagctgaccgagctgaccgagctggcgaagagcgtgaccaagaacgacgtggacggcttcgagttctacctgaacaccttccacgacgtgatggtgggcaacaacctgttcggccgcagcgccctgaagaccgccagcgagctgatcaccaaggagaacgtgaagaccagcggcagcgaggtgggcaacgtgtacaacttcctgatcgtgctgaccgccctgcaggcccaggccttcctgaccctgaccacctgtcgcaagctgctgggcctggccgacatcgactacaccagcatcatgaacgagcacttgaacaaggagaaggaggagttccgcgtgaacatcctgccgaccctgagcaacaccttcagcaacccgaactacgccaaggtgaagggcagcgacgaggacgccaagatgatcgtggaggctaagccgggccacgcgttgatcggcttcgagatcagcaacgacagcatcaccgtgctgaaggtgtacgaggccaagctgaagcagaactaccaggtggacaaggacagcttgagcgaggtgatctacggcgacatggacaagctgctgtgtccggaccagagcgagcaaatctactacaccaacaacatcgtgttcccgaacgagtacgtgatcaccaagatcgacttcaccaagaagatgaagaccctgcgctacgaggtgaccgccaacttctacgacagcagcaccggcgagatcgacctgaacaagaagaaggtggagagcagcgaggccgagtaccgcaccctgagcgcgaacgacgacggcgtctacatgccactgggcgtgatcagcgagaccttcctgaccccgatcaacggctttggcctgcaggccgacgagaacagccgcctgatcaccctgacctgtaagagctacctgcgcgagctgctgctagccaccgacctgagcaacaaggagaccaagctgatcgtgccaccgagcggcttcatcagcaacatcgtggagaacggcagcatcgaggaggacaacctggagccgtggaaggccaacaacaagaacgcctacgtcgaccacaccggcggcgtgaacggcaccaaggccctgtacgtgcacaaggacggcggcatcagccagttcatcggcgacaagctgaagccgaagaccgagtacgtgatccagtacaccgtgaagggcaagccatcgattcacctgaaggacgagaacaccggctacatccactacgaggacaccaacaacaacctggaggactaccagaccatcaacaagcgcttcaccaccggcaccgacctgaagggcgtgtacctgatcctgaagagccagaacggcgacgaggcctggggcgacaacttcatcatcctggagatcagcccgagcgagaagctgctgagcccggagctgatcaacaccaacaactggaccagcaccggcagcaccaacatcagcggcaacaccctgaccctgtaccagggcggccgcggcatcctgaagcagaacctgcagctggacagcttcagcacctaccgcgtgtacttcagcgtgagcggcgacgccaacgtgcgcatccgcaactcccgcgaggtgctgttcgagaagaggtacatgagcggcgccaaggacgtgagcgagatgttcaccaccaagttcgagaaggacaacttctacatcgagctgagccagggcaacaacctgtacggcggcccgatcgtgcacttctacgacgtgagcatcaagtaggagctctagatcttatctgcacaaagtggagtagtcagtcatcgatcaggaaccagacaccagacttttattcatacagtgaagtgaagtgaagtgcagtgcagtgagttgctggtttttgtacaacttagtatgtatttgtatttgtaaaatacttctatcaataaaatttctaattcctaaaaccaaaatccaggctacacggaccgcgatcgcttaattaagcttgcatgcctgcagtgcagcgtgacccggtcgtgcccctctctagagataatgagcattgcatgtctaagttataaaaaattaccacatattttttttgtcacacttgtttgaagtgcagtttatctatctttatacatatatttaaactttactctacgaataatataatctatagtactacaataatatcagtgttttagagaatcatataaatgaacagttagacatggtctaaaggacaattgagtattttgacaacaggactctacagttttatctttttagtgtgcatgtgttctcctttttttttgcaaatagcttcacctatataatacttcatccattttattagtacatccatttagggtttagggttaatggtttttatagactaatttttttagtacatctattttattctattttagcctctaaattaagaaaactaaaactctattttagtttttttatttaataatttagatataaaatagaataaaataaagtgactaaaaattaaacaaataccctttaagaaattaaaaaaactaaggaaacatttttcttgtttcgagtagataatgccagcctgttaaacgccgccgacgagtctaacggacaccaaccagcgaaccagcagcgtcgcgtcgggccaagcgaagcagacggcacggcatctctgtcgctgcctctggacccctctcgagagttccgctccaccgttggacttgctccgctgtcggcatccagaaattgcgtggcggagcggcagacgtgagccggcacggcaggcggcctcctcctcctctcacggcaccggcagctacgggggattcctttcccaccgctccttcgctttcccttcctcgcccgccgtaataaatagacaccccctccacaccctctttccccaacctcgtgttgttcggagcgcacacacacacaaccagatctcccccaaatccacccgtcggcacctccgcttcaaggtacgccgctcgtcctccccccccccccctctctaccttctctagatcggcgttccggtccatagttagggcccggtagttctacttctgttcatgtttgtgttagatccgtgtttgtgttagatccgtgctgttagcgttcgtacacggatgcgacctgtacgtcagacacgttctgattgctaacttgccagtgtttctctttggggaatcctgggatggctctagccgttccgcagacgggatcgatttcatgattttttttgtttcgttgcatagggtttggtttgcccttttcctttatttcaatatatgccgtgcacttgtttgtcgggtcatcttttcatgcttttttttgtcttggttgtgatgatgtggtctggttgggcggtcgttctagatcggagtagaattctgtttcaaactacctggtggatttattaattttggatctgtatgtgtgtgccatacatattcatagttacgaattgaagatgatggatggaaatatcgatctaggataggtatacatgttgatgcgggttttactgatgcatatacagagatgctttttgttcgcttggttgtgatgatgtggtgtggttgggcggtcgttcattcgttctagatcggagtagaatactgtttcaaactacctggtgtatttattaattttggaactgtatgtgtgtgtcatacatcttcatagttacgagtttaagatggatggaaatatcgatctaggataggtatacatgttgatgtgggttttactgatgcatatacatgatggcatatgcagcatctattcatatgctctaaccttgagtacctatctattataataaacaagtatgttttataattattttgatcttgatatacttggatgatggcatatgcagcagctatatgtggatttttttagccctgccttcatacgctatttatttgcttggtactgtttcttttgtcgatgctcaccctgttgtttggtgttacttctgcagggatctccgatcatgcaaaaactcattaactcagtgcaaaactatgcctggggcagcaaaacggcgttgactgaactttatggtatggaaaatccgtccagccagccgatggccgagctgtggatgggcgcacatccgaaaagcagttcacgagtgcagaatgccgccggagatatcgtttcactgcgtgatgtgattgagagtgataaatcgactctgctcggagaggccgttgccaaacgctttggcgaactgcctttcctgttcaaagtattatgcgcagcacagccactctccattcaggttcatccaaacaaacacaattctgaaatcggttttgccaaagaaaatgccgcaggtatcccgatggatgccgccgagcgtaactataaagatcctaaccacaagccggagctggtttttgcgctgacgcctttccttgcgatgaacgcgtttcgtgaattttccgagattgtctccctactccagccggtcgcaggtgcacatccggcgattgctcactttttacaacagcctgatgccgaacgtttaagcgaactgttcgccagcctgttgaatatgcagggtgaagaaaaatcccgcgcgctggcgattttaaaatcggccctcgatagccagcagggtgaaccgtggcaaacgattcgtttaatttctgaattttacccggaagacagcggtctgttctccccgctattgctgaatgtggtgaaattgaaccctggcgaagcgatgttcctgttcgctgaaacaccgcacgcttacctgcaaggcgtggcgctggaagtgatggcaaactccgataacgtgctgcgtgcgggtctgacgcctaaatacattgatattccggaactggttgccaatgtgaaattcgaagccaaaccggctaaccagttgttgacccagccggtgaaacaaggtgcagaactggacttcccgattccagtggatgattttgccttctcgctgcatgaccttagtgataaagaaaccaccattagccagcagagtgccgccattttgttctgcgtcgaaggcgatgcaacgttgtggaaaggttctcagcagttacagcttaaaccgggtgaatcagcgtttattgccgccaacgaatcaccggtgactgtcaaaggccacggccgtttagcgcgtgtttacaacaagctgtaagagcttactgaaaaaattaacatctcttgctaagctgggtcatgggtcgtttaagctgccgatgtgcctgcgtcgtctggtgccctctctccatatggaggttgtcaaagtatctgctgttcgtgtcatgagtcgtgtcagtgttggtttaataatggaccggttgtgttgtgtgtgcgtactacccagaactatgacaaatcatgaataagtttgatgtttgaaattaaagcctgtgctcattatgttctgtctttcagttgtctcctaatatttgcctccaggtactggctatctaccgtttcttacttaggaggtgtttgaatgcactaaaactaatagttagtggctaaaattagttaaaacatccaaacaccatagctaatagttgaactattagctatttttggaaaattagttaatagtgaggtagttatttgttagctagctaattcaactaacaatttttagccaactaacaattagtttcagtgcattcaaacacccccttaatgttaacgtggttctatctaccgtctcctaatatatggttgattgttcggtttgttgctatgctattgggttctgattgctgctagttcttgctgaatccagaagttctcgtagtatagctcagattcatattatttatttgagtgataagtgatccaggttattactatgttagctaggttttttttacaaggataaattatctgtgatcataattcttatgaaagctttatgtttcctggaggcagtggcatgcaatgcatgacagcaacttgatcacaccagctgaggtagatacggtaacaaggttcttaaatctgttcaccaaatcattggagaacacacatacacattcttgccagtcttggttagagaaatttcatgacaaaatgccaaagctgtcttgactcttcacttttggccatgagtcgtgacttagtttggtttaatggaccggttctcctagcttgttctactcaaaactgttgttgatgcgaataagttgtgatggttgatctctggattttgttttgctctcaatagtggacgagattagatagcctgcaggcccgggggcgcgccctaattagctaacggccaggatcgccgcgtgagcctttagcaactagctagattaattaacgcaatctgttattaagttgtctaagcgtcaatttgtttacaccacaatatatcctgccaccagccagccaacagctccccgaccggcagctcggcacaaaatcaccactcgatacaggcagcccatcagaattaattctcatgtttgacagcttatcatcgactgcacggtgcaccaatgcttctggcgtcaggcagccatcggaagctgtggtatggctgtgcaggtcgtaaatcactgcataattcgtgtcgctcaaggcgcactcccgttctggataatgttttttgcgccgacatcataacggttctggcaaatattctgaaatgagctgttgacaattaatcatccggctcgtataatgtgtggaattgtgagcggataacaatttcacacaggaaacagaccatgagggaagcgttgatcgccgaagtatcgactcaactatcagaggtagttggcgtcatcgagcgccatctcgaaccgacgttgctggccgtacatttgtacggctccgcagtggatggcggcctgaagccacacagtgatattgatttgctggttacggtgaccgtaaggcttgatgaaacaacgcggcgagctttgatcaacgaccttttggaaacttcggcttcccctggagagagcgagattctccgcgctgtagaagtcaccattgttgtgcacgacgacatcattccgtggcgttatccagctaagcgcgaactgcaatttggagaatggcagcgcaatgacattcttgcaggtatcttcgagccagccacgatcgacattgatctggctatcttgctgacaaaagcaagagaacatagcgttgccttggtaggtccagcggcggaggaactctttgatccggttcctgaacaggatctatttgaggcgctaaatgaaaccttaacgctatggaactcgccgcccgactgggctggcgatgagcgaaatgtagtgcttacgttgtcccgcatttggtacagcgcagtaaccggcaaaatcgcgccgaaggatgtcgctgccgactgggcaatggagcgcctgccggcccagtatcagcccgtcatacttgaagctaggcaggcttatcttggacaagaagatcgcttggcctcgcgcgcagatcagttggaagaatttgttcactacgtgaaaggcgagatcaccaaagtagtcggcaaataaagctctagtggatctccgtacccagggatctggctcgcggcggacgcacgacgccggggcgagaccataggcgatctcctaaatcaatagtagctgtaacctcgaagcgtttcacttgtaacaacgattgagaatttttgtcataaaattgaaatacttggttcgcatttttgtcatccgcggtcagccgcaattctgacgaactgcccatttagctggagatgattgtacatccttcacgtgaaaatttctcaagcgctgtgaacaagggttcagattttagattgaaaggtgagccgttgaaacacgttcttcttgtcgatgacgacgtcgctatgcggcatcttattattgaataccttacgatccacgccttcaaagtgaccgcggtagccgacagcacccagttcacaagagtactctcttccgcgacggtcgatgtcgtggttgttgatctagatttaggtcgtgaagatgggctcgagatcgttcgtaatctggcggcaaagtctgatattccaatcataattatcagtggcgaccgccttgaggagacggataaagttgttgcactcgagctaggagcaagtgattttatcgctaagccgttcagtatcagagagtttctagcacgcattcgggttgccttgcgcgtgcgccccaacgttgtccgctccaaagaccgacggtctttttgttttactgactggacacttaatctcaggcaacgtcgcttgatgtccgaagctggcggtgaggtgaaacttacggcaggtgagttcaatcttctcctcgcgtttttagagaaaccccgcgacgttctatcgcgcgagcaacttctcattgccagtcgagtacgcgacgaggaggtttatgacaggagtatagatgttctcattttgaggctgcgccgcaaacttgaggcagatccgtcaagccctcaactgataaaaacagcaagaggtgccggttatttctttgacgcggacgtgcaggtttcgcacggggggacgatggcagcctgagccaattcccagatccccgaggaatcggcgtgagcggtcgcaaaccatccggcccggtacaaatcggcgcggcgctgggtgatgacctggtggagaagttgaaggccgcgcaggccgcccagcggcaacgcatcgaggcagaagcacgccccggtgaatcgtggcaagcggccgctgatcgaatccgcaaagaatcccggcaaccgccggcagccggtgcgccgtcgattaggaagccgcccaagggcgacgagcaaccagattttttcgttccgatgctctatgacgtgggcacccgcgatagtcgcagcatcatggacgtggccgttttccgtctgtcgaagcgtgaccgacgagctggcgaggtgatccgctacgagcttccagacgggcacgtagaggtttccgcagggccggccggcatggccagtgtgtgggattacgacctggtactgatggcggtttcccatctaaccgaatccatgaaccgataccgggaagggaagggagacaagcccggccgcgtgttccgtccacacgttgcggacgtactcaagttctgccggcgagccgatggcggaaagcagaaagacgacctggtagaaacctgcattcggttaaacaccacgcacgttgccatgcagcgtacgaagaaggccaagaacggccgcctggtgacggtatccgagggtgaagccttgattagccgctacaagatcgtaaagagcgaaaccgggcggccggagtacatcgagatcgagctggctgattggatgtaccgcgagatcacagaaggcaagaacccggacgtgctgacggttcaccccgattactttttgatcgatcccggcatcggccgttttctctaccgcctggcacgccgcgccgcaggcaaggcagaagccagatggttgttcaagacgatctacgaacgcagtggcagcgccggagagttcaagaagttctgtttcaccgtgcgcaagctgatcgggtcaaatgacctgccggagtacgatttgaaggaggaggcggggcaggctggcccgatcctagtcatgcgctaccgcaacctgatcgagggcgaagcatccgccggttcctaatgtacggagcagatgctagggcaaattgccctagcaggggaaaaaggtcgaaaaggtctctttcctgtggatagcacgtacattgggaacccaaagccgtacattgggaaccggaacccgtacattgggaacccaaagccgtacattgggaaccggtcacacatgtaagtgactgatataaaagagaaaaaaggcgatttttccgcctaaaactctttaaaacttattaaaactcttaaaacccgcctggcctgtgcataactgtctggccagcgcacagccgaagagctgcaaaaagcgcctacccttcggtcgctgcgctccctacgccccgccgcttcgcgtcggcctatcgcggccgctggccgctcaaaaatggctggcctacggccaggcaatctaccagggcgcggacaagccgcgccgtcgccactcgaccgccggcgctgaggtctgcctcgtgaagaaggtgttgctgactcataccaggcctgaatcgccccatcatccagccagaaagtgagggagccacggttgatgagagctttgttgtaggtggaccagttggtgattttgaacttttgctttgccacggaacggtctgcgttgtcgggaagatgcgtgatctgatccttcaactcagcaaaagttcgatttattcaacaaagccgccgtcccgtcaagtcagcgtaatgctctgccagtgttacaaccaattaaccaattctgattagaaaaactcatcgagcatcaaatgaaactgcaatttattcatatcaggattatcaataccatatttttgaaaaagccgtttctgtaatgaaggagaaaactcaccgaggcagttccataggatggcaagatcctggtatcggtctgcgattccgactcgtccaacatcaatacaacctattaatttcccctcgtcaaaaataaggttatcaagtgagaaatcaccatgagtgacgactgaatccggtgagaatggcaaaagctctgcattaatgaatcggccaacgcgcggggagaggcggtttgcgtattgggcgctcttccgcttcctcgctcactgactcgctgcgctcggtcgttcggctgcggcgagcggtatcagctcactcaaaggcggtaatacggttatccacagaatcaggggataacgcaggaaagaacatgtgagcaaaaggccagcaaaaggccaggaaccgtaaaaaggccgcgttgctggcgtttttccataggctccgcccccctgacgagcatcacaaaaatcgacgctcaagtcagaggtggcgaaacccgacaggactataaagataccaggcgtttccccctggaagctccctcgtgcgctctcctgttccgaccctgccgcttaccggatacctgtccgcctttctcccttcgggaagcgtggcgctttctcatagctcacgctgtaggtatctcagttcggtgtaggtcgttcgctccaagctgggctgtgtgcacgaaccccccgttcagcccgaccgctgcgccttatccggtaactatcgtcttgagtccaacccggtaagacacgacttatcgccactggcagcagccactggtaacaggattagcagagcgaggtatgtaggcggtgctacagagttcttgaagtggtggcctaactacggctacactagaagaacagtatttggtatctgcgctctgctgaagccagttaccttcggaaaaagagttggtagctcttgatccggcaaacaaaccaccgctggtagcggtggtttttttgtttgcaagcagcagattacgcgcagaaaaaaaggatctcaagaagatcctttgatcttttctacggggtctgacgctcagtggaacgaaaactcacgttaagggattttggtcatgagattatcaaaaaggatcttcacctagatccttttgatccggaatta

SEQ ID NO: 109 - DNA, 16488 bp, Artificial Sequence
  23714 vector
attcctgtggttggcatgcacatacaaatggacgaacggataaaccttttcacgcccttttaaatatccgattattctaataaacgctcttttctcttaggtttacccgccaatatatcctgtcaaacactgatagtttaaactggcactagcctaacggtgttgactaactaggccgcttccctaattagctaacccgggggcgcgccgggaccctaattagctaaggtacctgcagtgcagcgtgacccggtcgtgcccctctctagagataatgagcattgcatgtctaagttataaaaaattaccacatattttttttgtcacacttgtttgaagtgcagtttatctatctttatacatatatttaaactttactctacgaataatataatctatagtactacaataatatcagtgttttagagaatcatataaatgaacagttagacatggtctaaaggacaattgagtattttgacaacaggactctacagttttatctttttagtgtgcatgtgttctcctttttttttgcaaatagcttcacctatataatacttcatccattttattagtacatccatttagggtttagggttaatggtttttatagactaatttttttagtacatctattttattctattttagcctctaaattaagaaaactaaaactctattttagtttttttatttaataatttagatataaaatagaataaaataaagtgactaaaaattaaacaaataccctttaagaaattaaaaaaactaaggaaacatttttcttgtttcgagtagataatgccagcctgttaaacgccgtcgacgagtctaacggacaccaaccagcgaaccagcagcgtcgcgtcgggccaagcgaagcagacggcacggcatctctgtcgctgcctctggacccctctcgagagttccgctccaccgttggacttgctccgctgtcggcatccagaaattgcgtggcggagcggcagacgtgagccggcacggcaggcggcctcctcctcctctcacggcaccggcagctacgggggattcctttcccaccgctccttcgctttcccttcctcgcccgccgtaataaatagacaccccctccacaccctctttccccaacctcgtgttgttcggagcgcacacacacacaaccagatctcccccaaatccacccgtcggcacctccgcttcctaggtacgccgctcgtcctccccccccccccctctctaccttctctagatcggcgttccggtccatagttagggcccggtagttctacttctgttcatgtttgtgttagatccgtgtttgtgttagatccgtgctgctagcgttcgtacacggatgcgacctgtacgtcagacacgttctgattgctaacttgccagtgtttctctttggggaatcctgggatggctctagccgttccgcagacgggatcgatttcatgattttttttgtttcgttgcatagggtttggtttgcccttttcctttatttcaatatatgccgtgcacttgtttgtcgggtcatcttttcatgcttttttttgtcttggttgtgatgatgtggtctggttgggcggtcgttctagatcggagtagaattctgtttcaaactacctggtggatttattaattttggatctgtatgtgtgtgccatacatattcatagttacgaattgaagatgatggatggaaatatcgatctaggataggtatacatgttgatgcgggttttactgatgcatatacagagatgctttttgttcgcttggttgtgatgatgtggtgtggttgggcggtcgttcattcgttctagatcggagtagaatactgtttcaaactacctggtgtatttattaattttggaactgtatgtgtgtgtcatacatcttcatagttacgagtttaagatggatggaaatatcgatctaggataggtatacatgttgatgtgggttttactgatgcatatacatgatggcatatgcagcatctattcatatgctctaaccttgagtacctatctattataataaacaagtatgttttataattattttgatcttgatatacttggatgatggcatatccagcagctatatgtggatttttttagccctgccttcatacgctatttatttgcttggtactgtttcttttgtcgatgctcaccctgttgtttggtgttacttctgcaggatcctctaagtagcagccatgaacaagaacaacaccaagctgagcacccgcgccctgccgagcttcatcgactacttcaacggcatctacggcttcgccaccggcatcaaggacatcatgaacatgatcttcaagaccgacaccggcggcgacctgaccctggacgagatcctgaagaaccagcagctgctgaacgacatcagcggcaagctggacggcgtgaacggcagcctgaacgacctgatcgcccagggcaacctgaacaccgagctgagcaaggagatccttaagatcgccaacgagcagaaccaggtgctgaacgacgtgaacaacaagctggacgccatcaacaccatgctgcgcgtgtacctgccgaagatcaccagcatgctgagcgacgtgattaagcagaactacgccctgagcctgcagatcgagtacctgagcaagcagctgcaggagatcagcgacaagctggacatcatcaacgtgaacgtcctgatcaacagcaccctgaccgagatcaccccggcctaccagcgcatcaagtacgtgaacgagaagttcgaagagctgaccttcgccaccgagaccagcagcaaggtgaagaaggacggcagcccggccgacatcctggacgagctgaccgagctgaccgagctggcgaagagcgtgaccaagaacgacgtggacggcttcgagttctacctgaacaccttccacgacgtgatggtgggcaacaacctgttcggccgcagcgccctgaagaccgccagcgagctgatcaccaaggagaacgtgaagaccagcggcagcgaggtgggcaacgtgtacaacttcctgatcgtgctgaccgccctgcaggcccaggccttcctgaccctgaccacctgtcgcaagctgctgggcctggccgacatcgactacaccagcatcatgaacgagcacttgaacaaggagaaggaggagttccgcgtgaacatcctgccgaccctgagcaacaccttcagcaacccgaactacgccaaggtgaagggcagcgacgaggacgccaagatgatcgtggaggctaagccgggccacgcgttgatcggcttcgagatcagcaacgacagcatcaccgtgctgaaggtgtacgaggccaagctgaagcagaactaccaggtggacaaggacagcttgagcgaggtgatctacggcgacatggacaagctgctgtgtccggaccagagcgagcaaatctactacaccaacaacatcgtgttcccgaacgagtacgtgatcaccaagatcgacttcaccaagaagatgaagaccctgcgctacgaggtgaccgccaacttctacgacagcagcaccggcgagatcgacctgaacaagaagaaggtggagagcagcgaggccgagtaccgcaccctgagcgcgaacgacgacggcgtctacatgccactgggcgtgatcagcgagaccttcctgaccccgatcaacggctttggcctgcaggccgacgagaacagccgcctgatcaccctgacctgtaagagctacctgcgcgagctgctgctagccaccgacctgagcaacaaggagaccaagctgatcgtgccaccgagcggcttcatcagcaacatcgtggagaacggcagcatcgaggaggacaacctggagccgtggaaggccaacaacaagaacgcctacgtcgaccacaccggcggcgtgaacggcaccaaggccctgtacgtgcacaaggacggcggcatcagccagttcatcggcgacaagctgaagccgaagaccgagtacgtgatccagtacaccgtgaagggcaagccatcgattcacctgaaggacgagaacaccggctacatccactacgaggacaccaacaacaacctggaggactaccagaccatcaacaagcgcttcaccaccggcaccgacctgaagggcgtgtacctgatcctgaagagccagaacggcgacgaggcctggggcgacaacttcatcatcctggagatcagcccgagcgagaagctgctgagcccggagctgatcaacaccaacaactggaccagcaccggcagcaccaacatcagcggcaacaccctgaccctgtaccagggcggccgcggcatcctgaagcagaacctgcagctggacagcttcagcacctaccgcgtgtacttcagcgtgagcggcgacgccaacgtgcgcatccgcaactcccgcgaggtgctgttcgagaagaggtacatgagcggcgccaaggacgtgagcgagatgttcaccaccaagttcgagaaggacaacttctacatcgagctgagccagggcaacaacctgtacggcggcccgatcgtgcacttctacgacgtgagcatcaagtaggagctctatacgcacacacatgttgagatattagaggaaactgaagaattacgccacattatctgcacaaagtggagtagtcagtcatcgatcaggaaccagacaccagacttttattcatacagtgaagtgaagtgaagtgcagtgcagtgagttgctggtttttgtacaacttagtatgtatttgtatttgtaaaatacttctatcaataaaatttctaattcctaaaaccaaaatccaggctacacggaccgcgatcgctgacgaggctgatataatttagggctggttcggttaggggtggattgagaaggattgaaggggattaaatatcctcctattgaaatttgaataggtccaatccacatcaatctatctcaaactgaataaggctttagggctgatttgttgatcaaggatcacgagagattgaaatcccctccaacaccctgtgatcctcttgtcaccaaatcaatctagggagtgtttggctcccaccaccaccttctagactaaaattttagtcttttagtttgtaaactactaaacagtatgactaagattctgtttggaggcaattaaatttttaagaaactgattttttttatcttttagttaggaggggctagcttcttggtttttaagaaactatgaatcaaatttttataaactgaggcataaactgatatgtttgaaacaacctcaatttccataaacaatttttaaaaaaattgggcaaataggctctaaatgtagtctcacaaatataaattttagggactaaagtgtagttcttaaagtttagaaggatgactaaagaaacaagaattccccatgctcgatttttttttacagagaaaaaacatttttttaagtttaaccaagtatatagaaaatgttttatatctaaataagttcattctgaaagtatactccactatcattctaacgataattactacgcatcgttatttcctaatataaattagagtgcagtgactttgtaacaccgtggagtgatgaactatttctcaaagtttggtcatggtgaactgaactaaaaagccagagcagctagctccacgcgagtgccagaacaaggcgccgtgcttttgcagcttttcaacaagggtcaagggggcagcaaggcatactctgtgtgatttgtgaagggcagcagcccgggtaggtgtaactgaaaaacagatgctgctgctgctctcctgagtcctgaactcccaacggtgcctgccttctctaggaggcctataaatttgggtcgagcagcagagcaacgccttcacagccaatgcagggtagcttctcacctccaaacagctagtctctgttcttacccattccaccctgttacgaaaagctagaaaagtgtcaggcactgaaagtgagagttggaggaaagcaaaccggctgggtatcggattcagcaacggagggtgctgccggtcggtttgttttcctccaatatctcaccttcagtcgatagtctgatgaagatgtacactaccaacatccattcatttgtgccatctgaagtgaggattagaggcaactgaaccatcatctattgcaaaggttcagtttcctctaatatctcatctcgaatgggcccatcgccggagatgtttgtttgcatatagctgaaaatgcagtcacccaaagtgagtgctgaaaggaatttctaacacctaggttgaattgagtgatactgaagtgtttggccatctgctagtactaaccactagtcaaacagatggcaatccacgttgtcatcgagttggctgaacagatttgctcggaaaggtatacattctccatttgggacatgtgtgggagccaggggatggagcagattggaggggattttagcctctcgaatcccctccatttcgctggctcctaaacaagccgcccttgaagtgctgatttgaggtaagtaaaccgaccggagaagcagggacaaagaagtatcgtttcatcagatgtgatgcaccaacttctaccgttattttgacaaagcactgcatgtaaatctgcagtggtttatccaatagcaaacttgttctctactttgtcactgtactaactgaaactgacgaacatccccacttgtattacaattttatctcgatctgcagggtaagacagctttcgcgtgtatacacacaagtcgagaaaacccctcattcgtatgcattaacttgagagctagaaatctagaatgcgatcgcttaattaagcttgcatgcctgcagtgcagcgtgacccggtcgtgcccctctctagagataatgagcattgcatgtctaagttataaaaaattaccacatattttttttgtcacacttgtttgaagtgcagtttatctatctttatacatatatttaaactttactctacgaataatataatctatagtactacaataatatcagtgttttagagaatcatataaatgaacagttagacatggtctaaaggacaattgagtattttgacaacaggactctacagttttatctttttagtgtgcatgtgttctcctttttttttgcaaatagcttcacctatataatacttcatccattttattagtacatccatttagggtttagggttaatggtttttatagactaatttttttagtacatctattttattctattttagcctctaaattaagaaaactaaaactctattttagtttttttatttaataatttagatataaaatagaataaaataaagtgactaaaaattaaacaaataccctttaagaaattaaaaaaactaaggaaacatttttcttgtttcgagtagataatgccagcctgttaaacgccgccgacgagtctaacggacaccaaccagcgaaccagcagcgtcgcgtcgggccaagcgaagcagacggcacggcatctctgtcgctgcctctggacccctctcgagagttccgctccaccgttggacttgctccgctgtcggcatccagaaattgcgtggcggagcggcagacgtgagccggcacggcaggcggcctcctcctcctctcacggcaccggcagctacgggggattcctttcccaccgctccttcgctttcccttcctcgcccgccgtaataaatagacaccccctccacaccctctttccccaacctcgtgttgttcggagcgcacacacacacaaccagatctcccccaaatccacccgtcggcacctccgcttcaaggtacgccgctcgtcctccccccccccccctctctaccttctctagatcggcgttccggtccatagttagggcccggtagttctacttctgttcatgtttgtgttagatccgtgtttgtgttagatccgtgctgttagcgttcgtacacggatgcgacctgtacgtcagacacgttctgattgctaacttgccagtgtttctctttggggaatcctgggatggctctagccgttccgcagacgggatcgatttcatgattttttttgtttcgttgcatagggtttggtttgcccttttcctttatttcaatatatgccgtgcacttgtttgtcgggtcatcttttcatgcttttttttgtcttggttgtgatgatgtggtctggttgggcggtcgttctagatcggagtagaattctgtttcaaactacctggtggatttattaattttggatctgtatgtgtgtgccatacatattcatagttacgaattgaagatgatggatggaaatatcgatctaggataggtatacatgttgatgcgggttttactgatgcatatacagagatgctttttgttcgcttggttgtgatgatgtggtgtggttgggcggtcgttcattcgttctagatcggagtagaatactgtttcaaactacctggtgtatttattaattttggaactgtatgtgtgtgtcatacatcttcatagttacgagtttaagatggatggaaatatcgatctaggataggtatacatgttgatgtgggttttactgatgcatatacatgatggcatatgcagcatctattcatatgctctaaccttgagtacctatctattataataaacaagtatgttttataattattttgatcttgatatacttggatgatggcatatgcagcagctatatgtggatttttttagccctgccttcatacgctatttatttgcttggtactgtttcttttgtcgatgctcaccctgttgtttggtgttacttctgcagggatctccgatcatgcaaaaactcattaactcagtgcaaaactatgcctggggcagcaaaacggcgttgactgaactttatggtatggaaaatccgtccagccagccgatggccgagctgtggatgggcgcacatccgaaaagcagttcacgagtgcagaatgccgccggagatatcgtttcactgcgtgatgtgattgagagtgataaatcgactctgctcggagaggccgttgccaaacgctttggcgaactgcctttcctgttcaaagtattatgcgcagcacagccactctccattcaggttcatccaaacaaacacaattctgaaatcggttttgccaaagaaaatgccgcaggtatcccgatggatgccgccgagcgtaactataaagatcctaaccacaagccggagctggtttttgcgctgacgcctttccttgcgatgaacgcgtttcgtgaattttccgagattgtctccctactccagccggtcgcaggtgcacatccggcgattgctcactttttacaacagcctgatgccgaacgtttaagcgaactgttcgccagcctgttgaatatgcagggtgaagaaaaatcccgcgcgctggcgattttaaaatcggccctcgatagccagcagggtgaaccgtggcaaacgattcgtttaatttctgaattttacccggaagacagcggtctgttctccccgctattgctgaatgtggtgaaattgaaccctggcgaagcgatgttcctgttcgctgaaacaccgcacgcttacctgcaaggcgtggcgctggaagtgatggcaaactccgataacgtgctgcgtgcgggtctgacgcctaaatacattgatattccggaactggttgccaatgtgaaattcgaagccaaaccggctaaccagttgttgacccagccggtgaaacaaggtgcagaactggacttcccgattccagtggatgattttgccttctcgctgcatgaccttagtgataaagaaaccaccattagccagcagagtgccgccattttgttctgcgtcgaaggcgatgcaacgttgtggaaaggttctcagcagttacagcttaaaccgggtgaatcagcgtttattgccgccaacgaatcaccggtgactgtcaaaggccacggccgtttagcgcgtgtttacaacaagctgtaagagcttactgaaaaaattaacatctcttgctaagctgggtcatgggtcgtttaagctgccgatgtgcctgcgtcgtctggtgccctctctccatatggaggttgtcaaagtatctgctgttcgtgtcatgagtcgtgtcagtgttggtttaataatggaccggttgtgttgtgtgtgcgtactacccagaactatgacaaatcatgaataagtttgatgtttgaaattaaagcctgtgctcattatgttctgtctttcagttgtctcctaatatttgcctccaggtactggctatctaccgtttcttacttaggaggtgtttgaatgcactaaaactaatagttagtggctaaaattagttaaaacatccaaacaccatagctaatagttgaactattagctatttttggaaaattagttaatagtgaggtagttatttgttagctagctaattcaactaacaatttttagccaactaacaattagtttcagtgcattcaaacacccccttaatgttaacgtggttctatctaccgtctcctaatatatggttgattgttcggtttgttgctatgctattgggttctgattgctgctagttcttgctgaatccagaagttctcgtagtatagctcagattcatattatttatttgagtgataagtgatccaggttattactatgttagctaggttttttttacaaggataaattatctgtgatcataattcttatgaaagctttatgtttcctggaggcagtggcatgcaatgcatgacagcaacttgatcacaccagctgaggtagatacggtaacaaggttcttaaatctgttcaccaaatcattggagaacacacatacacattcttgccagtcttggttagagaaatttcatgacaaaatgccaaagctgtcttgactcttcacttttggccatgagtcgtgacttagtttggtttaatggaccggttctcctagcttgttctactcaaaactgttgttgatgcgaataagttgtgatggttgatctctggattttgttttgctctcaatagtggacgagattagatagcctgcaggcccgggggcgcgccctaattagctaacggccaggatcgccgcgtgagcctttagcaactagctagattaattaacgcaatctgttattaagttgtctaagcgtcaatttgtttacaccacaatatatcctgccaccagccagccaacagctccccgaccggcagctcggcacaaaatcaccactcgatacaggcagcccatcagaattaattctcatgtttgacagcttatcatcgactgcacggtgcaccaatgcttctggcgtcaggcagccatcggaagctgtggtatggctgtgcaggtcgtaaatcactgcataattcgtgtcgctcaaggcgcactcccgttctggataatgttttttgcgccgacatcataacggttctggcaaatattctgaaatgagctgttgacaattaatcatccggctcgtataatgtgtggaattgtgagcggataacaatttcacacaggaaacagaccatgagggaagcgttgatcgccgaagtatcgactcaactatcagaggtagttggcgtcatcgagcgccatctcgaaccgacgttgctggccgtacatttgtacggctccgcagtggatggcggcctgaagccacacagtgatattgatttgctggttacggtgaccgtaaggcttgatgaaacaacgcggcgagctttgatcaacgaccttttggaaacttcggcttcccctggagagagcgagattctccgcgctgtagaagtcaccattgttgtgcacgacgacatcattccgtggcgttatccagctaagcgcgaactgcaatttggagaatggcagcgcaatgacattcttgcaggtatcttcgagccagccacgatcgacattgatctggctatcttgctgacaaaagcaagagaacatagcgttgccttggtaggtccagcggcggaggaactctttgatccggttcctgaacaggatctatttgaggcgctaaatgaaaccttaacgctatggaactcgccgcccgactgggctggcgatgagcgaaatgtagtgcttacgttgtcccgcatttggtacagcgcagtaaccggcaaaatcgcgccgaaggatgtcgctgccgactgggcaatggagcgcctgccggcccagtatcagcccgtcatacttgaagctaggcaggcttatcttggacaagaagatcgcttggcctcgcgcgcagatcagttggaagaatttgttcactacgtgaaaggcgagatcaccaaagtagtcggcaaataaagctctagtggatctccgtacccagggatctggctcgcggcggacgcacgacgccggggcgagaccataggcgatctcctaaatcaatagtagctgtaacctcgaagcgtttcacttgtaacaacgattgagaatttttgtcataaaattgaaatacttggttcgcatttttgtcatccgcggtcagccgcaattctgacgaactgcccatttagctggagatgattgtacatccttcacgtgaaaatttctcaagcgctgtgaacaagggttcagattttagattgaaaggtgagccgttgaaacacgttcttcttgtcgatgacgacgtcgctatgcggcatcttattattgaataccttacgatccacgccttcaaagtgaccgcggtagccgacagcacccagttcacaagagtactctcttccgcgacggtcgatgtcgtggttgttgatctagatttaggtcgtgaagatgggctcgagatcgttcgtaatctggcggcaaagtctgatattccaatcataattatcagtggcgaccgccttgaggagacggataaagttgttgcactcgagctaggagcaagtgattttatcgctaagccgttcagtatcagagagtttctagcacgcattcgggttgccttgcgcgtgcgccccaacgttgtccgctccaaagaccgacggtctttttgttttactgactggacacttaatctcaggcaacgtcgcttgatgtccgaagctggcggtgaggtgaaacttacggcaggtgagttcaatcttctcctcgcgtttttagagaaaccccgcgacgttctatcgcgcgagcaacttctcattgccagtcgagtacgcgacgaggaggtttatgacaggagtatagatgttctcattttgaggctgcgccgcaaacttgaggcagatccgtcaagccctcaactgataaaaacagcaagaggtgccggttatttctttgacgcggacgtgcaggtttcgcacggggggacgatggcagcctgagccaattcccagatccccgaggaatcggcgtgagcggtcgcaaaccatccggcccggtacaaatcggcgcggcgctgggtgatgacctggtggagaagttgaaggccgcgcaggccgcccagcggcaacgcatcgaggcagaagcacgccccggtgaatcgtggcaagcggccgctgatcgaatccgcaaagaatcccggcaaccgccggcagccggtgcgccgtcgattaggaagccgcccaagggcgacgagcaaccagattttttcgttccgatgctctatgacgtgggcacccgcgatagtcgcagcatcatggacgtggccgttttccgtctgtcgaagcgtgaccgacgagctggcgaggtgatccgctacgagcttccagacgggcacgtagaggtttccgcagggccggccggcatggccagtgtgtgggattacgacctggtactgatggcggtttcccatctaaccgaatccatgaaccgataccgggaagggaagggagacaagcccggccgcgtgttccgtccacacgttgcggacgtactcaagttctgccggcgagccgatggcggaaagcagaaagacgacctggtagaaacctgcattcggttaaacaccacgcacgttgccatgcagcgtacgaagaaggccaagaacggccgcctggtgacggtatccgagggtgaagccttgattagccgctacaagatcgtaaagagcgaaaccgggcggccggagtacatcgagatcgagctggctgattggatgtaccgcgagatcacagaaggcaagaacccggacgtgctgacggttcaccccgattactttttgatcgatcccggcatcggccgttttctctaccgcctggcacgccgcgccgcaggcaaggcagaagccagatggttgttcaagacgatctacgaacgcagtggcagcgccggagagttcaagaagttctgtttcaccgtgcgcaagctgatcgggtcaaatgacctgccggagtacgatttgaaggaggaggcggggcaggctggcccgatcctagtcatgcgctaccgcaacctgatcgagggcgaagcatccgccggttcctaatgtacggagcagatgctagggcaaattgccctagcaggggaaaaaggtcgaaaaggtctctttcctgtggatagcacgtacattgggaacccaaagccgtacattgggaaccggaacccgtacattgggaacccaaagccgtacattgggaaccggtcacacatgtaagtgactgatataaaagagaaaaaaggcgatttttccgcctaaaactctttaaaacttattaaaactcttaaaacccgcctggcctgtgcataactgtctggccagcgcacagccgaagagctgcaaaaagcgcctacccttcggtcgctgcgctccctacgccccgccgcttcgcgtcggcctatcgcggccgctggccgctcaaaaatggctggcctacggccaggcaatctaccagggcgcggacaagccgcgccgtcgccactcgaccgccggcgctgaggtctgcctcgtgaagaaggtgttgctgactcataccaggcctgaatcgccccatcatccagccagaaagtgagggagccacggttgatgagagctttgttgtaggtggaccagttggtgattttgaacttttgctttgccacggaacggtctgcgttgtcgggaagatgcgtgatctgatccttcaactcagcaaaagttcgatttattcaacaaagccgccgtcccgtcaagtcagcgtaatgctctgccagtgttacaaccaattaaccaattctgattagaaaaactcatcgagcatcaaatgaaactgcaatttattcatatcaggattatcaataccatatttttgaaaaagccgtttctgtaatgaaggagaaaactcaccgaggcagttccataggatggcaagatcctggtatcggtctgcgattccgactcgtccaacatcaatacaacctattaatttcccctcgtcaaaaataaggttatcaagtgagaaatcaccatgagtgacgactgaatccggtgagaatggcaaaagctctgcattaatgaatcggccaacgcgcggggagaggcggtttgcgtattgggcgctcttccgcttcctcgctcactgactcgctgcgctcggtcgttcggctgcggcgagcggtatcagctcactcaaaggcggtaatacggttatccacagaatcaggggataacgcaggaaagaacatgtgagcaaaaggccagcaaaaggccaggaaccgtaaaaaggccgcgttgctggcgtttttccataggctccgcccccctgacgagcatcacaaaaatcgacgctcaagtcagaggtggcgaaacccgacaggactataaagataccaggcgtttccccctggaagctccctcgtgcgctctcctgttccgaccctgccgcttaccggatacctgtccgcctttctcccttcgggaagcgtggcgctttctcatagctcacgctgtaggtatctcagttcggtgtaggtcgttcgctccaagctgggctgtgtgcacgaaccccccgttcagcccgaccgctgcgccttatccggtaactatcgtcttgagtccaacccggtaagacacgacttatcgccactggcagcagccactggtaacaggattagcagagcgaggtatgtaggcggtgctacagagttcttgaagtggtggcctaactacggctacactagaagaacagtatttggtatctgcgctctgctgaagccagttaccttcggaaaaagagttggtagctcttgatccggcaaacaaaccaccgctggtagcggtggtttttttgtttgcaagcagcagattacgcgcagaaaaaaaggatctcaagaagatcctttgatcttttctacggggtctgacgctcagtggaacgaaaactcacgttaagggattttggtcatgagattatcaaaaaggatcttcacctagatccttttgatccggaatta

SEQ ID NO: 110 - DNA, 14500 bp, Artificial Sequence
  23715 vector
attcctgtggttggcatgcacatacaaatggacgaacggataaaccttttcacgcccttttaaatatccgattattctaataaacgctcttttctcttaggtttacccgccaatatatcctgtcaaacactgatagtttaaactggcactagcctaacggtgttgactaactaggccgcttccctaattagctaacccgggggcgcgccgggaccctaattagctaaggtacctgcagtgcagcgtgacccggtcgtgcccctctctagagataatgagcattgcatgtctaagttataaaaaattaccacatattttttttgtcacacttgtttgaagtgcagtttatctatctttatacatatatttaaactttactctacgaataatataatctatagtactacaataatatcagtgttttagagaatcatataaatgaacagttagacatggtctaaaggacaattgagtattttgacaacaggactctacagttttatctttttagtgtgcatgtgttctcctttttttttgcaaatagcttcacctatataatacttcatccattttattagtacatccatttagggtttagggttaatggtttttatagactaatttttttagtacatctattttattctattttagcctctaaattaagaaaactaaaactctattttagtttttttatttaataatttagatataaaatagaataaaataaagtgactaaaaattaaacaaataccctttaagaaattaaaaaaactaaggaaacatttttcttgtttcgagtagataatgccagcctgttaaacgccgtcgacgagtctaacggacaccaaccagcgaaccagcagcgtcgcgtcgggccaagcgaagcagacggcacggcatctctgtcgctgcctctggacccctctcgagagttccgctccaccgttggacttgctccgctgtcggcatccagaaattgcgtggcggagcggcagacgtgagccggcacggcaggcggcctcctcctcctctcacggcaccggcagctacgggggattcctttcccaccgctccttcgctttcccttcctcgcccgccgtaataaatagacaccccctccacaccctctttccccaacctcgtgttgttcggagcgcacacacacacaaccagatctcccccaaatccacccgtcggcacctccgcttcctaggtacgccgctcgtcctccccccccccccctctctaccttctctagatcggcgttccggtccatagttagggcccggtagttctacttctgttcatgtttgtgttagatccgtgtttgtgttagatccgtgctgctagcgttcgtacacggatgcgacctgtacgtcagacacgttctgattgctaacttgccagtgtttctctttggggaatcctgggatggctctagccgttccgcagacgggatcgatttcatgattttttttgtttcgttgcatagggtttggtttgcccttttcctttatttcaatatatgccgtgcacttgtttgtcgggtcatcttttcatgcttttttttgtcttggttgtgatgatgtggtctggttgggcggtcgttctagatcggagtagaattctgtttcaaactacctggtggatttattaattttggatctgtatgtgtgtgccatacatattcatagttacgaattgaagatgatggatggaaatatcgatctaggataggtatacatgttgatgcgggttttactgatgcatatacagagatgctttttgttcgcttggttgtgatgatgtggtgtggttgggcggtcgttcattcgttctagatcggagtagaatactgtttcaaactacctggtgtatttattaattttggaactgtatgtgtgtgtcatacatcttcatagttacgagtttaagatggatggaaatatcgatctaggataggtatacatgttgatgtgggttttactgatgcatatacatgatggcatatgcagcatctattcatatgctctaaccttgagtacctatctattataataaacaagtatgttttataattattttgatcttgatatacttggatgatggcatatccagcagctatatgtggatttttttagccctgccttcatacgctatttatttgcttggtactgtttcttttgtcgatgctcaccctgttgtttggtgttacttctgcaggatcctctaagtagcagccatgaacaagaacaacaccaagctgagcacccgcgccctgccgagcttcatcgactacttcaacggcatctacggcttcgccaccggcatcaaggacatcatgaacatgatcttcaagaccgacaccggcggcgacctgaccctggacgagatcctgaagaaccagcagctgctgaacgacatcagcggcaagctggacggcgtgaacggcagcctgaacgacctgatcgcccagggcaacctgaacaccgagctgagcaaggagatccttaagatcgccaacgagcagaaccaggtgctgaacgacgtgaacaacaagctggacgccatcaacaccatgctgcgcgtgtacctgccgaagatcaccagcatgctgagcgacgtgattaagcagaactacgccctgagcctgcagatcgagtacctgagcaagcagctgcaggagatcagcgacaagctggacatcatcaacgtgaacgtcctgatcaacagcaccctgaccgagatcaccccggcctaccagcgcatcaagtacgtgaacgagaagttcgaagagctgaccttcgccaccgagaccagcagcaaggtgaagaaggacggcagcccggccgacatcctggacgagctgaccgagctgaccgagctggcgaagagcgtgaccaagaacgacgtggacggcttcgagttctacctgaacaccttccacgacgtgatggtgggcaacaacctgttcggccgcagcgccctgaagaccgccagcgagctgatcaccaaggagaacgtgaagaccagcggcagcgaggtgggcaacgtgtacaacttcctgatcgtgctgaccgccctgcaggcccaggccttcctgaccctgaccacctgtcgcaagctgctgggcctggccgacatcgactacaccagcatcatgaacgagcacttgaacaaggagaaggaggagttccgcgtgaacatcctgccgaccctgagcaacaccttcagcaacccgaactacgccaaggtgaagggcagcgacgaggacgccaagatgatcgtggaggctaagccgggccacgcgttgatcggcttcgagatcagcaacgacagcatcaccgtgctgaaggtgtacgaggccaagctgaagcagaactaccaggtggacaaggacagcttgagcgaggtgatctacggcgacatggacaagctgctgtgtccggaccagagcgagcaaatctactacaccaacaacatcgtgttcccgaacgagtacgtgatcaccaagatcgacttcaccaagaagatgaagaccctgcgctacgaggtgaccgccaacttctacgacagcagcaccggcgagatcgacctgaacaagaagaaggtggagagcagcgaggccgagtaccgcaccctgagcgcgaacgacgacggcgtctacatgccactgggcgtgatcagcgagaccttcctgaccccgatcaacggctttggcctgcaggccgacgagaacagccgcctgatcaccctgacctgtaagagctacctgcgcgagctgctgctagccaccgacctgagcaacaaggagaccaagctgatcgtgccaccgagcggcttcatcagcaacatcgtggagaacggcagcatcgaggaggacaacctggagccgtggaaggccaacaacaagaacgcctacgtcgaccacaccggcggcgtgaacggcaccaaggccctgtacgtgcacaaggacggcggcatcagccagttcatcggcgacaagctgaagccgaagaccgagtacgtgatccagtacaccgtgaagggcaagccatcgattcacctgaaggacgagaacaccggctacatccactacgaggacaccaacaacaacctggaggactaccagaccatcaacaagcgcttcaccaccggcaccgacctgaagggcgtgtacctgatcctgaagagccagaacggcgacgaggcctggggcgacaacttcatcatcctggagatcagcccgagcgagaagctgctgagcccggagctgatcaacaccaacaactggaccagcaccggcagcaccaacatcagcggcaacaccctgaccctgtaccagggcggccgcggcatcctgaagcagaacctgcagctggacagcttcagcacctaccgcgtgtacttcagcgtgagcggcgacgccaacgtgcgcatccgcaactcccgcgaggtgctgttcgagaagaggtacatgagcggcgccaaggacgtgagcgagatgttcaccaccaagttcgagaaggacaacttctacatcgagctgagccagggcaacaacctgtacggcggcccgatcgtgcacttctacgacgtgagcatcaagtaggagctccgccaaatgaatcttcttgagattttagagtaaactgaaactgactgttgcattatctgcacaaagtggagtagtcagtcatcgatcaggaaccagacaccagacttttattcatacagtgaagtgaagtgaagtgcagtgcagtgagttgctggtttttgtacaacttagtatgtatttgtatttgtaaaatacttctatcaataaaatttctaattcctaaaaccaaaatccaggctacacggaccgcgatcgcttaattaagcttgcatgcctgcagtgcagcgtgacccggtcgtgcccctctctagagataatgagcattgcatgtctaagttataaaaaattaccacatattttttttgtcacacttgtttgaagtgcagtttatctatctttatacatatatttaaactttactctacgaataatataatctatagtactacaataatatcagtgttttagagaatcatataaatgaacagttagacatggtctaaaggacaattgagtattttgacaacaggactctacagttttatctttttagtgtgcatgtgttctcctttttttttgcaaatagcttcacctatataatacttcatccattttattagtacatccatttagggtttagggttaatggtttttatagactaatttttttagtacatctattttattctattttagcctctaaattaagaaaactaaaactctattttagtttttttatttaataatttagatataaaatagaataaaataaagtgactaaaaattaaacaaataccctttaagaaattaaaaaaactaaggaaacatttttcttgtttcgagtagataatgccagcctgttaaacgccgccgacgagtctaacggacaccaaccagcgaaccagcagcgtcgcgtcgggccaagcgaagcagacggcacggcatctctgtcgctgcctctggacccctctcgagagttccgctccaccgttggacttgctccgctgtcggcatccagaaattgcgtggcggagcggcagacgtgagccggcacggcaggcggcctcctcctcctctcacggcaccggcagctacgggggattcctttcccaccgctccttcgctttcccttcctcgcccgccgtaataaatagacaccccctccacaccctctttccccaacctcgtgttgttcggagcgcacacacacacaaccagatctcccccaaatccacccgtcggcacctccgcttcaaggtacgccgctcgtcctccccccccccccctctctaccttctctagatcggcgttccggtccatagttagggcccggtagttctacttctgttcatgtttgtgttagatccgtgtttgtgttagatccgtgctgttagcgttcgtacacggatgcgacctgtacgtcagacacgttctgattgctaacttgccagtgtttctctttggggaatcctgggatggctctagccgttccgcagacgggatcgatttcatgattttttttgtttcgttgcatagggtttggtttgcccttttcctttatttcaatatatgccgtgcacttgtttgtcgggtcatcttttcatgcttttttttgtcttggttgtgatgatgtggtctggttgggcggtcgttctagatcggagtagaattctgtttcaaactacctggtggatttattaattttggatctgtatgtgtgtgccatacatattcatagttacgaattgaagatgatggatggaaatatcgatctaggataggtatacatgttgatgcgggttttactgatgcatatacagagatgctttttgttcgcttggttgtgatgatgtggtgtggttgggcggtcgttcattcgttctagatcggagtagaatactgtttcaaactacctggtgtatttattaattttggaactgtatgtgtgtgtcatacatcttcatagttacgagtttaagatggatggaaatatcgatctaggataggtatacatgttgatgtgggttttactgatgcatatacatgatggcatatgcagcatctattcatatgctctaaccttgagtacctatctattataataaacaagtatgttttataattattttgatcttgatatacttggatgatggcatatgcagcagctatatgtggatttttttagccctgccttcatacgctatttatttgcttggtactgtttcttttgtcgatgctcaccctgttgtttggtgttacttctgcagggatctccgatcatgcaaaaactcattaactcagtgcaaaactatgcctggggcagcaaaacggcgttgactgaactttatggtatggaaaatccgtccagccagccgatggccgagctgtggatgggcgcacatccgaaaagcagttcacgagtgcagaatgccgccggagatatcgtttcactgcgtgatgtgattgagagtgataaatcgactctgctcggagaggccgttgccaaacgctttggcgaactgcctttcctgttcaaagtattatgcgcagcacagccactctccattcaggttcatccaaacaaacacaattctgaaatcggttttgccaaagaaaatgccgcaggtatcccgatggatgccgccgagcgtaactataaagatcctaaccacaagccggagctggtttttgcgctgacgcctttccttgcgatgaacgcgtttcgtgaattttccgagattgtctccctactccagccggtcgcaggtgcacatccggcgattgctcactttttacaacagcctgatgccgaacgtttaagcgaactgttcgccagcctgttgaatatgcagggtgaagaaaaatcccgcgcgctggcgattttaaaatcggccctcgatagccagcagggtgaaccgtggcaaacgattcgtttaatttctgaattttacccggaagacagcggtctgttctccccgctattgctgaatgtggtgaaattgaaccctggcgaagcgatgttcctgttcgctgaaacaccgcacgcttacctgcaaggcgtggcgctggaagtgatggcaaactccgataacgtgctgcgtgcgggtctgacgcctaaatacattgatattccggaactggttgccaatgtgaaattcgaagccaaaccggctaaccagttgttgacccagccggtgaaacaaggtgcagaactggacttcccgattccagtggatgattttgccttctcgctgcatgaccttagtgataaagaaaccaccattagccagcagagtgccgccattttgttctgcgtcgaaggcgatgcaacgttgtggaaaggttctcagcagttacagcttaaaccgggtgaatcagcgtttattgccgccaacgaatcaccggtgactgtcaaaggccacggccgtttagcgcgtgtttacaacaagctgtaagagcttactgaaaaaattaacatctcttgctaagctgggtcatgggtcgtttaagctgccgatgtgcctgcgtcgtctggtgccctctctccatatggaggttgtcaaagtatctgctgttcgtgtcatgagtcgtgtcagtgttggtttaataatggaccggttgtgttgtgtgtgcgtactacccagaactatgacaaatcatgaataagtttgatgtttgaaattaaagcctgtgctcattatgttctgtctttcagttgtctcctaatatttgcctccaggtactggctatctaccgtttcttacttaggaggtgtttgaatgcactaaaactaatagttagtggctaaaattagttaaaacatccaaacaccatagctaatagttgaactattagctatttttggaaaattagttaatagtgaggtagttatttgttagctagctaattcaactaacaatttttagccaactaacaattagtttcagtgcattcaaacacccccttaatgttaacgtggttctatctaccgtctcctaatatatggttgattgttcggtttgttgctatgctattgggttctgattgctgctagttcttgctgaatccagaagttctcgtagtatagctcagattcatattatttatttgagtgataagtgatccaggttattactatgttagctaggttttttttacaaggataaattatctgtgatcataattcttatgaaagctttatgtttcctggaggcagtggcatgcaatgcatgacagcaacttgatcacaccagctgaggtagatacggtaacaaggttcttaaatctgttcaccaaatcattggagaacacacatacacattcttgccagtcttggttagagaaatttcatgacaaaatgccaaagctgtcttgactcttcacttttggccatgagtcgtgacttagtttggtttaatggaccggttctcctagcttgttctactcaaaactgttgttgatgcgaataagttgtgatggttgatctctggattttgttttgctctcaatagtggacgagattagatagcctgcaggcccgggggcgcgccctaattagctaacggccaggatcgccgcgtgagcctttagcaactagctagattaattaacgcaatctgttattaagttgtctaagcgtcaatttgtttacaccacaatatatcctgccaccagccagccaacagctccccgaccggcagctcggcacaaaatcaccactcgatacaggcagcccatcagaattaattctcatgtttgacagcttatcatcgactgcacggtgcaccaatgcttctggcgtcaggcagccatcggaagctgtggtatggctgtgcaggtcgtaaatcactgcataattcgtgtcgctcaaggcgcactcccgttctggataatgttttttgcgccgacatcataacggttctggcaaatattctgaaatgagctgttgacaattaatcatccggctcgtataatgtgtggaattgtgagcggataacaatttcacacaggaaacagaccatgagggaagcgttgatcgccgaagtatcgactcaactatcagaggtagttggcgtcatcgagcgccatctcgaaccgacgttgctggccgtacatttgtacggctccgcagtggatggcggcctgaagccacacagtgatattgatttgctggttacggtgaccgtaaggcttgatgaaacaacgcggcgagctttgatcaacgaccttttggaaacttcggcttcccctggagagagcgagattctccgcgctgtagaagtcaccattgttgtgcacgacgacatcattccgtggcgttatccagctaagcgcgaactgcaatttggagaatggcagcgcaatgacattcttgcaggtatcttcgagccagccacgatcgacattgatctggctatcttgctgacaaaagcaagagaacatagcgttgccttggtaggtccagcggcggaggaactctttgatccggttcctgaacaggatctatttgaggcgctaaatgaaaccttaacgctatggaactcgccgcccgactgggctggcgatgagcgaaatgtagtgcttacgttgtcccgcatttggtacagcgcagtaaccggcaaaatcgcgccgaaggatgtcgctgccgactgggcaatggagcgcctgccggcccagtatcagcccgtcatacttgaagctaggcaggcttatcttggacaagaagatcgcttggcctcgcgcgcagatcagttggaagaatttgttcactacgtgaaaggcgagatcaccaaagtagtcggcaaataaagctctagtggatctccgtacccagggatctggctcgcggcggacgcacgacgccggggcgagaccataggcgatctcctaaatcaatagtagctgtaacctcgaagcgtttcacttgtaacaacgattgagaatttttgtcataaaattgaaatacttggttcgcatttttgtcatccgcggtcagccgcaattctgacgaactgcccatttagctggagatgattgtacatccttcacgtgaaaatttctcaagcgctgtgaacaagggttcagattttagattgaaaggtgagccgttgaaacacgttcttcttgtcgatgacgacgtcgctatgcggcatcttattattgaataccttacgatccacgccttcaaagtgaccgcggtagccgacagcacccagttcacaagagtactctcttccgcgacggtcgatgtcgtggttgttgatctagatttaggtcgtgaagatgggctcgagatcgttcgtaatctggcggcaaagtctgatattccaatcataattatcagtggcgaccgccttgaggagacggataaagttgttgcactcgagctaggagcaagtgattttatcgctaagccgttcagtatcagagagtttctagcacgcattcgggttgccttgcgcgtgcgccccaacgttgtccgctccaaagaccgacggtctttttgttttactgactggacacttaatctcaggcaacgtcgcttgatgtccgaagctggcggtgaggtgaaacttacggcaggtgagttcaatcttctcctcgcgtttttagagaaaccccgcgacgttctatcgcgcgagcaacttctcattgccagtcgagtacgcgacgaggaggtttatgacaggagtatagatgttctcattttgaggctgcgccgcaaacttgaggcagatccgtcaagccctcaactgataaaaacagcaagaggtgccggttatttctttgacgcggacgtgcaggtttcgcacggggggacgatggcagcctgagccaattcccagatccccgaggaatcggcgtgagcggtcgcaaaccatccggcccggtacaaatcggcgcggcgctgggtgatgacctggtggagaagttgaaggccgcgcaggccgcccagcggcaacgcatcgaggcagaagcacgccccggtgaatcgtggcaagcggccgctgatcgaatccgcaaagaatcccggcaaccgccggcagccggtgcgccgtcgattaggaagccgcccaagggcgacgagcaaccagattttttcgttccgatgctctatgacgtgggcacccgcgatagtcgcagcatcatggacgtggccgttttccgtctgtcgaagcgtgaccgacgagctggcgaggtgatccgctacgagcttccagacgggcacgtagaggtttccgcagggccggccggcatggccagtgtgtgggattacgacctggtactgatggcggtttcccatctaaccgaatccatgaaccgataccgggaagggaagggagacaagcccggccgcgtgttccgtccacacgttgcggacgtactcaagttctgccggcgagccgatggcggaaagcagaaagacgacctggtagaaacctgcattcggttaaacaccacgcacgttgccatgcagcgtacgaagaaggccaagaacggccgcctggtgacggtatccgagggtgaagccttgattagccgctacaagatcgtaaagagcgaaaccgggcggccggagtacatcgagatcgagctggctgattggatgtaccgcgagatcacagaaggcaagaacccggacgtgctgacggttcaccccgattactttttgatcgatcccggcatcggccgttttctctaccgcctggcacgccgcgccgcaggcaaggcagaagccagatggttgttcaagacgatctacgaacgcagtggcagcgccggagagttcaagaagttctgtttcaccgtgcgcaagctgatcgggtcaaatgacctgccggagtacgatttgaaggaggaggcggggcaggctggcccgatcctagtcatgcgctaccgcaacctgatcgagggcgaagcatccgccggttcctaatgtacggagcagatgctagggcaaattgccctagcaggggaaaaaggtcgaaaaggtctctttcctgtggatagcacgtacattgggaacccaaagccgtacattgggaaccggaacccgtacattgggaacccaaagccgtacattgggaaccggtcacacatgtaagtgactgatataaaagagaaaaaaggcgatttttccgcctaaaactctttaaaacttattaaaactcttaaaacccgcctggcctgtgcataactgtctggccagcgcacagccgaagagctgcaaaaagcgcctacccttcggtcgctgcgctccctacgccccgccgcttcgcgtcggcctatcgcggccgctggccgctcaaaaatggctggcctacggccaggcaatctaccagggcgcggacaagccgcgccgtcgccactcgaccgccggcgctgaggtctgcctcgtgaagaaggtgttgctgactcataccaggcctgaatcgccccatcatccagccagaaagtgagggagccacggttgatgagagctttgttgtaggtggaccagttggtgattttgaacttttgctttgccacggaacggtctgcgttgtcgggaagatgcgtgatctgatccttcaactcagcaaaagttcgatttattcaacaaagccgccgtcccgtcaagtcagcgtaatgctctgccagtgttacaaccaattaaccaattctgattagaaaaactcatcgagcatcaaatgaaactgcaatttattcatatcaggattatcaataccatatttttgaaaaagccgtttctgtaatgaaggagaaaactcaccgaggcagttccataggatggcaagatcctggtatcggtctgcgattccgactcgtccaacatcaatacaacctattaatttcccctcgtcaaaaataaggttatcaagtgagaaatcaccatgagtgacgactgaatccggtgagaatggcaaaagctctgcattaatgaatcggccaacgcgcggggagaggcggtttgcgtattgggcgctcttccgcttcctcgctcactgactcgctgcgctcggtcgttcggctgcggcgagcggtatcagctcactcaaaggcggtaatacggttatccacagaatcaggggataacgcaggaaagaacatgtgagcaaaaggccagcaaaaggccaggaaccgtaaaaaggccgcgttgctggcgtttttccataggctccgcccccctgacgagcatcacaaaaatcgacgctcaagtcagaggtggcgaaacccgacaggactataaagataccaggcgtttccccctggaagctccctcgtgcgctctcctgttccgaccctgccgcttaccggatacctgtccgcctttctcccttcgggaagcgtggcgctttctcatagctcacgctgtaggtatctcagttcggtgtaggtcgttcgctccaagctgggctgtgtgcacgaaccccccgttcagcccgaccgctgcgccttatccggtaactatcgtcttgagtccaacccggtaagacacgacttatcgccactggcagcagccactggtaacaggattagcagagcgaggtatgtaggcggtgctacagagttcttgaagtggtggcctaactacggctacactagaagaacagtatttggtatctgcgctctgctgaagccagttaccttcggaaaaagagttggtagctcttgatccggcaaacaaaccaccgctggtagcggtggtttttttgtttgcaagcagcagattacgcgcagaaaaaaaggatctcaagaagatcctttgatcttttctacggggtctgacgctcagtggaacgaaaactcacgttaagggattttggtcatgagattatcaaaaaggatcttcacctagatccttttgatccggaatta

SEQ ID NO: 111 - DNA, 14508 bp, Artificial Sequence
  23716 vector
attcctgtggttggcatgcacatacaaatggacgaacggataaaccttttcacgcccttttaaatatccgattattctaataaacgctcttttctcttaggtttacccgccaatatatcctgtcaaacactgatagtttaaactggcactagcctaacggtgttgactaactaggccgcttccctaattagctaacccgggggcgcgccgggaccctaattagctaaggtacctgcagtgcagcgtgacccggtcgtgcccctctctagagataatgagcattgcatgtctaagttataaaaaattaccacatattttttttgtcacacttgtttgaagtgcagtttatctatctttatacatatatttaaactttactctacgaataatataatctatagtactacaataatatcagtgttttagagaatcatataaatgaacagttagacatggtctaaaggacaattgagtattttgacaacaggactctacagttttatctttttagtgtgcatgtgttctcctttttttttgcaaatagcttcacctatataatacttcatccattttattagtacatccatttagggtttagggttaatggtttttatagactaatttttttagtacatctattttattctattttagcctctaaattaagaaaactaaaactctattttagtttttttatttaataatttagatataaaatagaataaaataaagtgactaaaaattaaacaaataccctttaagaaattaaaaaaactaaggaaacatttttcttgtttcgagtagataatgccagcctgttaaacgccgtcgacgagtctaacggacaccaaccagcgaaccagcagcgtcgcgtcgggccaagcgaagcagacggcacggcatctctgtcgctgcctctggacccctctcgagagttccgctccaccgttggacttgctccgctgtcggcatccagaaattgcgtggcggagcggcagacgtgagccggcacggcaggcggcctcctcctcctctcacggcaccggcagctacgggggattcctttcccaccgctccttcgctttcccttcctcgcccgccgtaataaatagacaccccctccacaccctctttccccaacctcgtgttgttcggagcgcacacacacacaaccagatctcccccaaatccacccgtcggcacctccgcttcctaggtacgccgctcgtcctccccccccccccctctctaccttctctagatcggcgttccggtccatagttagggcccggtagttctacttctgttcatgtttgtgttagatccgtgtttgtgttagatccgtgctgctagcgttcgtacacggatgcgacctgtacgtcagacacgttctgattgctaacttgccagtgtttctctttggggaatcctgggatggctctagccgttccgcagacgggatcgatttcatgattttttttgtttcgttgcatagggtttggtttgcccttttcctttatttcaatatatgccgtgcacttgtttgtcgggtcatcttttcatgcttttttttgtcttggttgtgatgatgtggtctggttgggcggtcgttctagatcggagtagaattctgtttcaaactacctggtggatttattaattttggatctgtatgtgtgtgccatacatattcatagttacgaattgaagatgatggatggaaatatcgatctaggataggtatacatgttgatgcgggttttactgatgcatatacagagatgctttttgttcgcttggttgtgatgatgtggtgtggttgggcggtcgttcattcgttctagatcggagtagaatactgtttcaaactacctggtgtatttattaattttggaactgtatgtgtgtgtcatacatcttcatagttacgagtttaagatggatggaaatatcgatctaggataggtatacatgttgatgtgggttttactgatgcatatacatgatggcatatgcagcatctattcatatgctctaaccttgagtacctatctattataataaacaagtatgttttataattattttgatcttgatatacttggatgatggcatatccagcagctatatgtggatttttttagccctgccttcatacgctatttatttgcttggtactgtttcttttgtcgatgctcaccctgttgtttggtgttacttctgcaggatcctctaagtagcagccatgtatacgcacacacatgttgagatattagaggaaactgaagaattacgccacattaacaagaacaacaccaagctgagcacccgcgccctgccgagcttcatcgactacttcaacggcatctacggcttcgccaccggcatcaaggacatcatgaacatgatcttcaagaccgacaccggcggcgacctgaccctggacgagatcctgaagaaccagcagctgctgaacgacatcagcggcaagctggacggcgtgaacggcagcctgaacgacctgatcgcccagggcaacctgaacaccgagctgagcaaggagatccttaagatcgccaacgagcagaaccaggtgctgaacgacgtgaacaacaagctggacgccatcaacaccatgctgcgcgtgtacctgccgaagatcaccagcatgctgagcgacgtgattaagcagaactacgccctgagcctgcagatcgagtacctgagcaagcagctgcaggagatcagcgacaagctggacatcatcaacgtgaacgtcctgatcaacagcaccctgaccgagatcaccccggcctaccagcgcatcaagtacgtgaacgagaagttcgaagagctgaccttcgccaccgagaccagcagcaaggtgaagaaggacggcagcccggccgacatcctggacgagctgaccgagctgaccgagctggcgaagagcgtgaccaagaacgacgtggacggcttcgagttctacctgaacaccttccacgacgtgatggtgggcaacaacctgttcggccgcagcgccctgaagaccgccagcgagctgatcaccaaggagaacgtgaagaccagcggcagcgaggtgggcaacgtgtacaacttcctgatcgtgctgaccgccctgcaggcccaggccttcctgaccctgaccacctgtcgcaagctgctgggcctggccgacatcgactacaccagcatcatgaacgagcacttgaacaaggagaaggaggagttccgcgtgaacatcctgccgaccctgagcaacaccttcagcaacccgaactacgccaaggtgaagggcagcgacgaggacgccaagatgatcgtggaggctaagccgggccacgcgttgatcggcttcgagatcagcaacgacagcatcaccgtgctgaaggtgtacgaggccaagctgaagcagaactaccaggtggacaaggacagcttgagcgaggtgatctacggcgacatggacaagctgctgtgtccggaccagagcgagcaaatctactacaccaacaacatcgtgttcccgaacgagtacgtgatcaccaagatcgacttcaccaagaagatgaagaccctgcgctacgaggtgaccgccaacttctacgacagcagcaccggcgagatcgacctgaacaagaagaaggtggagagcagcgaggccgagtaccgcaccctgagcgcgaacgacgacggcgtctacatgccactgggcgtgatcagcgagaccttcctgaccccgatcaacggctttggcctgcaggccgacgagaacagccgcctgatcaccctgacctgtaagagctacctgcgcgagctgctgctagccaccgacctgagcaacaaggagaccaagctgatcgtgccaccgagcggcttcatcagcaacatcgtggagaacggcagcatcgaggaggacaacctggagccgtggaaggccaacaacaagaacgcctacgtcgaccacaccggcggcgtgaacggcaccaaggccctgtacgtgcacaaggacggcggcatcagccagttcatcggcgacaagctgaagccgaagaccgagtacgtgatccagtacaccgtgaagggcaagccatcgattcacctgaaggacgagaacaccggctacatccactacgaggacaccaacaacaacctggaggactaccagaccatcaacaagcgcttcaccaccggcaccgacctgaagggcgtgtacctgatcctgaagagccagaacggcgacgaggcctggggcgacaacttcatcatcctggagatcagcccgagcgagaagctgctgagcccggagctgatcaacaccaacaactggaccagcaccggcagcaccaacatcagcggcaacaccctgaccctgtaccagggcggccgcggcatcctgaagcagaacctgcagctggacagcttcagcacctaccgcgtgtacttcagcgtgagcggcgacgccaacgtgcgcatccgcaactcccgcgaggtgctgttcgagaagaggtacatgagcggcgccaaggacgtgagcgagatgttcaccaccaagttcgagaaggacaacttctacatcgagctgagccagggcaacaacctgtacggcggcccgatcgtgcacttctacgacgtgagcatcaagtaggagctctagatcttatctgcacaaagtggagtagtcagtcatcgatcaggaaccagacaccagacttttattcatacagtgaagtgaagtgaagtgcagtgcagtgagttgctggtttttgtacaacttagtatgtatttgtatttgtaaaatacttctatcaataaaatttctaattcctaaaaccaaaatccaggctacacggaccgcgatcgcttaattaagcttgcatgcctgcagtgcagcgtgacccggtcgtgcccctctctagagataatgagcattgcatgtctaagttataaaaaattaccacatattttttttgtcacacttgtttgaagtgcagtttatctatctttatacatatatttaaactttactctacgaataatataatctatagtactacaataatatcagtgttttagagaatcatataaatgaacagttagacatggtctaaaggacaattgagtattttgacaacaggactctacagttttatctttttagtgtgcatgtgttctcctttttttttgcaaatagcttcacctatataatacttcatccattttattagtacatccatttagggtttagggttaatggtttttatagactaatttttttagtacatctattttattctattttagcctctaaattaagaaaactaaaactctattttagtttttttatttaataatttagatataaaatagaataaaataaagtgactaaaaattaaacaaataccctttaagaaattaaaaaaactaaggaaacatttttcttgtttcgagtagataatgccagcctgttaaacgccgccgacgagtctaacggacaccaaccagcgaaccagcagcgtcgcgtcgggccaagcgaagcagacggcacggcatctctgtcgctgcctctggacccctctcgagagttccgctccaccgttggacttgctccgctgtcggcatccagaaattgcgtggcggagcggcagacgtgagccggcacggcaggcggcctcctcctcctctcacggcaccggcagctacgggggattcctttcccaccgctccttcgctttcccttcctcgcccgccgtaataaatagacaccccctccacaccctctttccccaacctcgtgttgttcggagcgcacacacacacaaccagatctcccccaaatccacccgtcggcacctccgcttcaaggtacgccgctcgtcctccccccccccccctctctaccttctctagatcggcgttccggtccatagttagggcccggtagttctacttctgttcatgtttgtgttagatccgtgtttgtgttagatccgtgctgttagcgttcgtacacggatgcgacctgtacgtcagacacgttctgattgctaacttgccagtgtttctctttggggaatcctgggatggctctagccgttccgcagacgggatcgatttcatgattttttttgtttcgttgcatagggtttggtttgcccttttcctttatttcaatatatgccgtgcacttgtttgtcgggtcatcttttcatgcttttttttgtcttggttgtgatgatgtggtctggttgggcggtcgttctagatcggagtagaattctgtttcaaactacctggtggatttattaattttggatctgtatgtgtgtgccatacatattcatagttacgaattgaagatgatggatggaaatatcgatctaggataggtatacatgttgatgcgggttttactgatgcatatacagagatgctttttgttcgcttggttgtgatgatgtggtgtggttgggcggtcgttcattcgttctagatcggagtagaatactgtttcaaactacctggtgtatttattaattttggaactgtatgtgtgtgtcatacatcttcatagttacgagtttaagatggatggaaatatcgatctaggataggtatacatgttgatgtgggttttactgatgcatatacatgatggcatatgcagcatctattcatatgctctaaccttgagtacctatctattataataaacaagtatgttttataattattttgatcttgatatacttggatgatggcatatgcagcagctatatgtggatttttttagccctgccttcatacgctatttatttgcttggtactgtttcttttgtcgatgctcaccctgttgtttggtgttacttctgcagggatctccgatcatgcaaaaactcattaactcagtgcaaaactatgcctggggcagcaaaacggcgttgactgaactttatggtatggaaaatccgtccagccagccgatggccgagctgtggatgggcgcacatccgaaaagcagttcacgagtgcagaatgccgccggagatatcgtttcactgcgtgatgtgattgagagtgataaatcgactctgctcggagaggccgttgccaaacgctttggcgaactgcctttcctgttcaaagtattatgcgcagcacagccactctccattcaggttcatccaaacaaacacaattctgaaatcggttttgccaaagaaaatgccgcaggtatcccgatggatgccgccgagcgtaactataaagatcctaaccacaagccggagctggtttttgcgctgacgcctttccttgcgatgaacgcgtttcgtgaattttccgagattgtctccctactccagccggtcgcaggtgcacatccggcgattgctcactttttacaacagcctgatgccgaacgtttaagcgaactgttcgccagcctgttgaatatgcagggtgaagaaaaatcccgcgcgctggcgattttaaaatcggccctcgatagccagcagggtgaaccgtggcaaacgattcgtttaatttctgaattttacccggaagacagcggtctgttctccccgctattgctgaatgtggtgaaattgaaccctggcgaagcgatgttcctgttcgctgaaacaccgcacgcttacctgcaaggcgtggcgctggaagtgatggcaaactccgataacgtgctgcgtgcgggtctgacgcctaaatacattgatattccggaactggttgccaatgtgaaattcgaagccaaaccggctaaccagttgttgacccagccggtgaaacaaggtgcagaactggacttcccgattccagtggatgattttgccttctcgctgcatgaccttagtgataaagaaaccaccattagccagcagagtgccgccattttgttctgcgtcgaaggcgatgcaacgttgtggaaaggttctcagcagttacagcttaaaccgggtgaatcagcgtttattgccgccaacgaatcaccggtgactgtcaaaggccacggccgtttagcgcgtgtttacaacaagctgtaagagcttactgaaaaaattaacatctcttgctaagctgggtcatgggtcgtttaagctgccgatgtgcctgcgtcgtctggtgccctctctccatatggaggttgtcaaagtatctgctgttcgtgtcatgagtcgtgtcagtgttggtttaataatggaccggttgtgttgtgtgtgcgtactacccagaactatgacaaatcatgaataagtttgatgtttgaaattaaagcctgtgctcattatgttctgtctttcagttgtctcctaatatttgcctccaggtactggctatctaccgtttcttacttaggaggtgtttgaatgcactaaaactaatagttagtggctaaaattagttaaaacatccaaacaccatagctaatagttgaactattagctatttttggaaaattagttaatagtgaggtagttatttgttagctagctaattcaactaacaatttttagccaactaacaattagtttcagtgcattcaaacacccccttaatgttaacgtggttctatctaccgtctcctaatatatggttgattgttcggtttgttgctatgctattgggttctgattgctgctagttcttgctgaatccagaagttctcgtagtatagctcagattcatattatttatttgagtgataagtgatccaggttattactatgttagctaggttttttttacaaggataaattatctgtgatcataattcttatgaaagctttatgtttcctggaggcagtggcatgcaatgcatgacagcaacttgatcacaccagctgaggtagatacggtaacaaggttcttaaatctgttcaccaaatcattggagaacacacatacacattcttgccagtcttggttagagaaatttcatgacaaaatgccaaagctgtcttgactcttcacttttggccatgagtcgtgacttagtttggtttaatggaccggttctcctagcttgttctactcaaaactgttgttgatgcgaataagttgtgatggttgatctctggattttgttttgctctcaatagtggacgagattagatagcctgcaggcccgggggcgcgccctaattagctaacggccaggatcgccgcgtgagcctttagcaactagctagattaattaacgcaatctgttattaagttgtctaagcgtcaatttgtttacaccacaatatatcctgccaccagccagccaacagctccccgaccggcagctcggcacaaaatcaccactcgatacaggcagcccatcagaattaattctcatgtttgacagcttatcatcgactgcacggtgcaccaatgcttctggcgtcaggcagccatcggaagctgtggtatggctgtgcaggtcgtaaatcactgcataattcgtgtcgctcaaggcgcactcccgttctggataatgttttttgcgccgacatcataacggttctggcaaatattctgaaatgagctgttgacaattaatcatccggctcgtataatgtgtggaattgtgagcggataacaatttcacacaggaaacagaccatgagggaagcgttgatcgccgaagtatcgactcaactatcagaggtagttggcgtcatcgagcgccatctcgaaccgacgttgctggccgtacatttgtacggctccgcagtggatggcggcctgaagccacacagtgatattgatttgctggttacggtgaccgtaaggcttgatgaaacaacgcggcgagctttgatcaacgaccttttggaaacttcggcttcccctggagagagcgagattctccgcgctgtagaagtcaccattgttgtgcacgacgacatcattccgtggcgttatccagctaagcgcgaactgcaatttggagaatggcagcgcaatgacattcttgcaggtatcttcgagccagccacgatcgacattgatctggctatcttgctgacaaaagcaagagaacatagcgttgccttggtaggtccagcggcggaggaactctttgatccggttcctgaacaggatctatttgaggcgctaaatgaaaccttaacgctatggaactcgccgcccgactgggctggcgatgagcgaaatgtagtgcttacgttgtcccgcatttggtacagcgcagtaaccggcaaaatcgcgccgaaggatgtcgctgccgactgggcaatggagcgcctgccggcccagtatcagcccgtcatacttgaagctaggcaggcttatcttggacaagaagatcgcttggcctcgcgcgcagatcagttggaagaatttgttcactacgtgaaaggcgagatcaccaaagtagtcggcaaataaagctctagtggatctccgtacccagggatctggctcgcggcggacgcacgacgccggggcgagaccataggcgatctcctaaatcaatagtagctgtaacctcgaagcgtttcacttgtaacaacgattgagaatttttgtcataaaattgaaatacttggttcgcatttttgtcatccgcggtcagccgcaattctgacgaactgcccatttagctggagatgattgtacatccttcacgtgaaaatttctcaagcgctgtgaacaagggttcagattttagattgaaaggtgagccgttgaaacacgttcttcttgtcgatgacgacgtcgctatgcggcatcttattattgaataccttacgatccacgccttcaaagtgaccgcggtagccgacagcacccagttcacaagagtactctcttccgcgacggtcgatgtcgtggttgttgatctagatttaggtcgtgaagatgggctcgagatcgttcgtaatctggcggcaaagtctgatattccaatcataattatcagtggcgaccgccttgaggagacggataaagttgttgcactcgagctaggagcaagtgattttatcgctaagccgttcagtatcagagagtttctagcacgcattcgggttgccttgcgcgtgcgccccaacgttgtccgctccaaagaccgacggtctttttgttttactgactggacacttaatctcaggcaacgtcgcttgatgtccgaagctggcggtgaggtgaaacttacggcaggtgagttcaatcttctcctcgcgtttttagagaaaccccgcgacgttctatcgcgcgagcaacttctcattgccagtcgagtacgcgacgaggaggtttatgacaggagtatagatgttctcattttgaggctgcgccgcaaacttgaggcagatccgtcaagccctcaactgataaaaacagcaagaggtgccggttatttctttgacgcggacgtgcaggtttcgcacggggggacgatggcagcctgagccaattcccagatccccgaggaatcggcgtgagcggtcgcaaaccatccggcccggtacaaatcggcgcggcgctgggtgatgacctggtggagaagttgaaggccgcgcaggccgcccagcggcaacgcatcgaggcagaagcacgccccggtgaatcgtggcaagcggccgctgatcgaatccgcaaagaatcccggcaaccgccggcagccggtgcgccgtcgattaggaagccgcccaagggcgacgagcaaccagattttttcgttccgatgctctatgacgtgggcacccgcgatagtcgcagcatcatggacgtggccgttttccgtctgtcgaagcgtgaccgacgagctggcgaggtgatccgctacgagcttccagacgggcacgtagaggtttccgcagggccggccggcatggccagtgtgtgggattacgacctggtactgatggcggtttcccatctaaccgaatccatgaaccgataccgggaagggaagggagacaagcccggccgcgtgttccgtccacacgttgcggacgtactcaagttctgccggcgagccgatggcggaaagcagaaagacgacctggtagaaacctgcattcggttaaacaccacgcacgttgccatgcagcgtacgaagaaggccaagaacggccgcctggtgacggtatccgagggtgaagccttgattagccgctacaagatcgtaaagagcgaaaccgggcggccggagtacatcgagatcgagctggctgattggatgtaccgcgagatcacagaaggcaagaacccggacgtgctgacggttcaccccgattactttttgatcgatcccggcatcggccgttttctctaccgcctggcacgccgcgccgcaggcaaggcagaagccagatggttgttcaagacgatctacgaacgcagtggcagcgccggagagttcaagaagttctgtttcaccgtgcgcaagctgatcgggtcaaatgacctgccggagtacgatttgaaggaggaggcggggcaggctggcccgatcctagtcatgcgctaccgcaacctgatcgagggcgaagcatccgccggttcctaatgtacggagcagatgctagggcaaattgccctagcaggggaaaaaggtcgaaaaggtctctttcctgtggatagcacgtacattgggaacccaaagccgtacattgggaaccggaacccgtacattgggaacccaaagccgtacattgggaaccggtcacacatgtaagtgactgatataaaagagaaaaaaggcgatttttccgcctaaaactctttaaaacttattaaaactcttaaaacccgcctggcctgtgcataactgtctggccagcgcacagccgaagagctgcaaaaagcgcctacccttcggtcgctgcgctccctacgccccgccgcttcgcgtcggcctatcgcggccgctggccgctcaaaaatggctggcctacggccaggcaatctaccagggcgcggacaagccgcgccgtcgccactcgaccgccggcgctgaggtctgcctcgtgaagaaggtgttgctgactcataccaggcctgaatcgccccatcatccagccagaaagtgagggagccacggttgatgagagctttgttgtaggtggaccagttggtgattttgaacttttgctttgccacggaacggtctgcgttgtcgggaagatgcgtgatctgatccttcaactcagcaaaagttcgatttattcaacaaagccgccgtcccgtcaagtcagcgtaatgctctgccagtgttacaaccaattaaccaattctgattagaaaaactcatcgagcatcaaatgaaactgcaatttattcatatcaggattatcaataccatatttttgaaaaagccgtttctgtaatgaaggagaaaactcaccgaggcagttccataggatggcaagatcctggtatcggtctgcgattccgactcgtccaacatcaatacaacctattaatttcccctcgtcaaaaataaggttatcaagtgagaaatcaccatgagtgacgactgaatccggtgagaatggcaaaagctctgcattaatgaatcggccaacgcgcggggagaggcggtttgcgtattgggcgctcttccgcttcctcgctcactgactcgctgcgctcggtcgttcggctgcggcgagcggtatcagctcactcaaaggcggtaatacggttatccacagaatcaggggataacgcaggaaagaacatgtgagcaaaaggccagcaaaaggccaggaaccgtaaaaaggccgcgttgctggcgtttttccataggctccgcccccctgacgagcatcacaaaaatcgacgctcaagtcagaggtggcgaaacccgacaggactataaagataccaggcgtttccccctggaagctccctcgtgcgctctcctgttccgaccctgccgcttaccggatacctgtccgcctttctcccttcgggaagcgtggcgctttctcatagctcacgctgtaggtatctcagttcggtgtaggtcgttcgctccaagctgggctgtgtgcacgaaccccccgttcagcccgaccgctgcgccttatccggtaactatcgtcttgagtccaacccggtaagacacgacttatcgccactggcagcagccactggtaacaggattagcagagcgaggtatgtaggcggtgctacagagttcttgaagtggtggcctaactacggctacactagaagaacagtatttggtatctgcgctctgctgaagccagttaccttcggaaaaagagttggtagctcttgatccggcaaacaaaccaccgctggtagcggtggtttttttgtttgcaagcagcagattacgcgcagaaaaaaaggatctcaagaagatcctttgatcttttctacggggtctgacgctcagtggaacgaaaactcacgttaagggattttggtcatgagattatcaaaaaggatcttcacctagatccttttgatccggaatta

SEQ ID NO: 112 - DNA, 14478 bp, Artificial Sequence
  23717 vector
attcctgtggttggcatgcacatacaaatggacgaacggataaaccttttcacgcccttttaaatatccgattattctaataaacgctcttttctcttaggtttacccgccaatatatcctgtcaaacactgatagtttaaactggcactagcctaacggtgttgactaactaggccgcttccctaattagctaacccgggggcgcgccgggaccctaattagctaaggtacctgcagtgcagcgtgacccggtcgtgcccctctctagagataatgagcattgcatgtctaagttataaaaaattaccacatattttttttgtcacacttgtttgaagtgcagtttatctatctttatacatatatttaaactttactctacgaataatataatctatagtactacaataatatcagtgttttagagaatcatataaatgaacagttagacatggtctaaaggacaattgagtattttgacaacaggactctacagttttatctttttagtgtgcatgtgttctcctttttttttgcaaatagcttcacctatataatacttcatccattttattagtacatccatttagggtttagggttaatggtttttatagactaatttttttagtacatctattttattctattttagcctctaaattaagaaaactaaaactctattttagtttttttatttaataatttagatataaaatagaataaaataaagtgactaaaaattaaacaaataccctttaagaaattaaaaaaactaaggaaacatttttcttgtttcgagtagataatgccagcctgttaaacgccgtcgacgagtctaacggacaccaaccagcgaaccagcagcgtcgcgtcgggccaagcgaagcagacggcacggcatctctgtcgctgcctctggacccctctcgagagttccgctccaccgttggacttgctccgctgtcggcatccagaaattgcgtggcggagcggcagacgtgagccggcacggcaggcggcctcctcctcctctcacggcaccggcagctacgggggattcctttcccaccgctccttcgctttcccttcctcgcccgccgtaataaatagacaccccctccacaccctctttccccaacctcgtgttgttcggagcgcacacacacacaaccagatctcccccaaatccacccgtcggcacctccgcttcctaggtacgccgctcgtcctccccccccccccctctctaccttctctagatcggcgttccggtccatagttagggcccggtagttctacttctgttcatgtttgtgttagatccgtgtttgtgttagatccgtgctgctagcgttcgtacacggatgcgacctgtacgtcagacacgttctgattgctaacttgccagtgtttctctttggggaatcctgggatggctctagccgttccgcagacgggatcgatttcatgattttttttgtttcgttgcatagggtttggtttgcccttttcctttatttcaatatatgccgtgcacttgtttgtcgggtcatcttttcatgcttttttttgtcttggttgtgatgatgtggtctggttgggcggtcgttctagatcggagtagaattctgtttcaaactacctggtggatttattaattttggatctgtatgtgtgtgccatacatattcatagttacgaattgaagatgatggatggaaatatcgatctaggataggtatacatgttgatgcgggttttactgatgcatatacagagatgctttttgttcgcttggttgtgatgatgtggtgtggttgggcggtcgttcattcgttctagatcggagtagaatactgtttcaaactacctggtgtatttattaattttggaactgtatgtgtgtgtcatacatcttcatagttacgagtttaagatggatggaaatatcgatctaggataggtatacatgttgatgtgggttttactgatgcatatacatgatggcatatgcagcatctattcatatgctctaaccttgagtacctatctattataataaacaagtatgttttataattattttgatcttgatatacttggatgatggcatatccagcagctatatgtggatttttttagccctgccttcatacgctatttatttgcttggtactgtttcttttgtcgatgctcaccctgttgtttggtgttacttctgcaggatcctctaagtagcagccatggctgagatattagaggaaactgaaaacaagaacaacaccaagctgagcacccgcgccctgccgagcttcatcgactacttcaacggcatctacggcttcgccaccggcatcaaggacatcatgaacatgatcttcaagaccgacaccggcggcgacctgaccctggacgagatcctgaagaaccagcagctgctgaacgacatcagcggcaagctggacggcgtgaacggcagcctgaacgacctgatcgcccagggcaacctgaacaccgagctgagcaaggagatccttaagatcgccaacgagcagaaccaggtgctgaacgacgtgaacaacaagctggacgccatcaacaccatgctgcgcgtgtacctgccgaagatcaccagcatgctgagcgacgtgattaagcagaactacgccctgagcctgcagatcgagtacctgagcaagcagctgcaggagatcagcgacaagctggacatcatcaacgtgaacgtcctgatcaacagcaccctgaccgagatcaccccggcctaccagcgcatcaagtacgtgaacgagaagttcgaagagctgaccttcgccaccgagaccagcagcaaggtgaagaaggacggcagcccggccgacatcctggacgagctgaccgagctgaccgagctggcgaagagcgtgaccaagaacgacgtggacggcttcgagttctacctgaacaccttccacgacgtgatggtgggcaacaacctgttcggccgcagcgccctgaagaccgccagcgagctgatcaccaaggagaacgtgaagaccagcggcagcgaggtgggcaacgtgtacaacttcctgatcgtgctgaccgccctgcaggcccaggccttcctgaccctgaccacctgtcgcaagctgctgggcctggccgacatcgactacaccagcatcatgaacgagcacttgaacaaggagaaggaggagttccgcgtgaacatcctgccgaccctgagcaacaccttcagcaacccgaactacgccaaggtgaagggcagcgacgaggacgccaagatgatcgtggaggctaagccgggccacgcgttgatcggcttcgagatcagcaacgacagcatcaccgtgctgaaggtgtacgaggccaagctgaagcagaactaccaggtggacaaggacagcttgagcgaggtgatctacggcgacatggacaagctgctgtgtccggaccagagcgagcaaatctactacaccaacaacatcgtgttcccgaacgagtacgtgatcaccaagatcgacttcaccaagaagatgaagaccctgcgctacgaggtgaccgccaacttctacgacagcagcaccggcgagatcgacctgaacaagaagaaggtggagagcagcgaggccgagtaccgcaccctgagcgcgaacgacgacggcgtctacatgccactgggcgtgatcagcgagaccttcctgaccccgatcaacggctttggcctgcaggccgacgagaacagccgcctgatcaccctgacctgtaagagctacctgcgcgagctgctgctagccaccgacctgagcaacaaggagaccaagctgatcgtgccaccgagcggcttcatcagcaacatcgtggagaacggcagcatcgaggaggacaacctggagccgtggaaggccaacaacaagaacgcctacgtcgaccacaccggcggcgtgaacggcaccaaggccctgtacgtgcacaaggacggcggcatcagccagttcatcggcgacaagctgaagccgaagaccgagtacgtgatccagtacaccgtgaagggcaagccatcgattcacctgaaggacgagaacaccggctacatccactacgaggacaccaacaacaacctggaggactaccagaccatcaacaagcgcttcaccaccggcaccgacctgaagggcgtgtacctgatcctgaagagccagaacggcgacgaggcctggggcgacaacttcatcatcctggagatcagcccgagcgagaagctgctgagcccggagctgatcaacaccaacaactggaccagcaccggcagcaccaacatcagcggcaacaccctgaccctgtaccagggcggccgcggcatcctgaagcagaacctgcagctggacagcttcagcacctaccgcgtgtacttcagcgtgagcggcgacgccaacgtgcgcatccgcaactcccgcgaggtgctgttcgagaagaggtacatgagcggcgccaaggacgtgagcgagatgttcaccaccaagttcgagaaggacaacttctacatcgagctgagccagggcaacaacctgtacggcggcccgatcgtgcacttctacgacgtgagcatcaagtaggagctctagatcttatctgcacaaagtggagtagtcagtcatcgatcaggaaccagacaccagacttttattcatacagtgaagtgaagtgaagtgcagtgcagtgagttgctggtttttgtacaacttagtatgtatttgtatttgtaaaatacttctatcaataaaatttctaattcctaaaaccaaaatccaggctacacggaccgcgatcgcttaattaagcttgcatgcctgcagtgcagcgtgacccggtcgtgcccctctctagagataatgagcattgcatgtctaagttataaaaaattaccacatattttttttgtcacacttgtttgaagtgcagtttatctatctttatacatatatttaaactttactctacgaataatataatctatagtactacaataatatcagtgttttagagaatcatataaatgaacagttagacatggtctaaaggacaattgagtattttgacaacaggactctacagttttatctttttagtgtgcatgtgttctcctttttttttgcaaatagcttcacctatataatacttcatccattttattagtacatccatttagggtttagggttaatggtttttatagactaatttttttagtacatctattttattctattttagcctctaaattaagaaaactaaaactctattttagtttttttatttaataatttagatataaaatagaataaaataaagtgactaaaaattaaacaaataccctttaagaaattaaaaaaactaaggaaacatttttcttgtttcgagtagataatgccagcctgttaaacgccgccgacgagtctaacggacaccaaccagcgaaccagcagcgtcgcgtcgggccaagcgaagcagacggcacggcatctctgtcgctgcctctggacccctctcgagagttccgctccaccgttggacttgctccgctgtcggcatccagaaattgcgtggcggagcggcagacgtgagccggcacggcaggcggcctcctcctcctctcacggcaccggcagctacgggggattcctttcccaccgctccttcgctttcccttcctcgcccgccgtaataaatagacaccccctccacaccctctttccccaacctcgtgttgttcggagcgcacacacacacaaccagatctcccccaaatccacccgtcggcacctccgcttcaaggtacgccgctcgtcctccccccccccccctctctaccttctctagatcggcgttccggtccatagttagggcccggtagttctacttctgttcatgtttgtgttagatccgtgtttgtgttagatccgtgctgttagcgttcgtacacggatgcgacctgtacgtcagacacgttctgattgctaacttgccagtgtttctctttggggaatcctgggatggctctagccgttccgcagacgggatcgatttcatgattttttttgtttcgttgcatagggtttggtttgcccttttcctttatttcaatatatgccgtgcacttgtttgtcgggtcatcttttcatgcttttttttgtcttggttgtgatgatgtggtctggttgggcggtcgttctagatcggagtagaattctgtttcaaactacctggtggatttattaattttggatctgtatgtgtgtgccatacatattcatagttacgaattgaagatgatggatggaaatatcgatctaggataggtatacatgttgatgcgggttttactgatgcatatacagagatgctttttgttcgcttggttgtgatgatgtggtgtggttgggcggtcgttcattcgttctagatcggagtagaatactgtttcaaactacctggtgtatttattaattttggaactgtatgtgtgtgtcatacatcttcatagttacgagtttaagatggatggaaatatcgatctaggataggtatacatgttgatgtgggttttactgatgcatatacatgatggcatatgcagcatctattcatatgctctaaccttgagtacctatctattataataaacaagtatgttttataattattttgatcttgatatacttggatgatggcatatgcagcagctatatgtggatttttttagccctgccttcatacgctatttatttgcttggtactgtttcttttgtcgatgctcaccctgttgtttggtgttacttctgcagggatctccgatcatgcaaaaactcattaactcagtgcaaaactatgcctggggcagcaaaacggcgttgactgaactttatggtatggaaaatccgtccagccagccgatggccgagctgtggatgggcgcacatccgaaaagcagttcacgagtgcagaatgccgccggagatatcgtttcactgcgtgatgtgattgagagtgataaatcgactctgctcggagaggccgttgccaaacgctttggcgaactgcctttcctgttcaaagtattatgcgcagcacagccactctccattcaggttcatccaaacaaacacaattctgaaatcggttttgccaaagaaaatgccgcaggtatcccgatggatgccgccgagcgtaactataaagatcctaaccacaagccggagctggtttttgcgctgacgcctttccttgcgatgaacgcgtttcgtgaattttccgagattgtctccctactccagccggtcgcaggtgcacatccggcgattgctcactttttacaacagcctgatgccgaacgtttaagcgaactgttcgccagcctgttgaatatgcagggtgaagaaaaatcccgcgcgctggcgattttaaaatcggccctcgatagccagcagggtgaaccgtggcaaacgattcgtttaatttctgaattttacccggaagacagcggtctgttctccccgctattgctgaatgtggtgaaattgaaccctggcgaagcgatgttcctgttcgctgaaacaccgcacgcttacctgcaaggcgtggcgctggaagtgatggcaaactccgataacgtgctgcgtgcgggtctgacgcctaaatacattgatattccggaactggttgccaatgtgaaattcgaagccaaaccggctaaccagttgttgacccagccggtgaaacaaggtgcagaactggacttcccgattccagtggatgattttgccttctcgctgcatgaccttagtgataaagaaaccaccattagccagcagagtgccgccattttgttctgcgtcgaaggcgatgcaacgttgtggaaaggttctcagcagttacagcttaaaccgggtgaatcagcgtttattgccgccaacgaatcaccggtgactgtcaaaggccacggccgtttagcgcgtgtttacaacaagctgtaagagcttactgaaaaaattaacatctcttgctaagctgggtcatgggtcgtttaagctgccgatgtgcctgcgtcgtctggtgccctctctccatatggaggttgtcaaagtatctgctgttcgtgtcatgagtcgtgtcagtgttggtttaataatggaccggttgtgttgtgtgtgcgtactacccagaactatgacaaatcatgaataagtttgatgtttgaaattaaagcctgtgctcattatgttctgtctttcagttgtctcctaatatttgcctccaggtactggctatctaccgtttcttacttaggaggtgtttgaatgcactaaaactaatagttagtggctaaaattagttaaaacatccaaacaccatagctaatagttgaactattagctatttttggaaaattagttaatagtgaggtagttatttgttagctagctaattcaactaacaatttttagccaactaacaattagtttcagtgcattcaaacacccccttaatgttaacgtggttctatctaccgtctcctaatatatggttgattgttcggtttgttgctatgctattgggttctgattgctgctagttcttgctgaatccagaagttctcgtagtatagctcagattcatattatttatttgagtgataagtgatccaggttattactatgttagctaggttttttttacaaggataaattatctgtgatcataattcttatgaaagctttatgtttcctggaggcagtggcatgcaatgcatgacagcaacttgatcacaccagctgaggtagatacggtaacaaggttcttaaatctgttcaccaaatcattggagaacacacatacacattcttgccagtcttggttagagaaatttcatgacaaaatgccaaagctgtcttgactcttcacttttggccatgagtcgtgacttagtttggtttaatggaccggttctcctagcttgttctactcaaaactgttgttgatgcgaataagttgtgatggttgatctctggattttgttttgctctcaatagtggacgagattagatagcctgcaggcccgggggcgcgccctaattagctaacggccaggatcgccgcgtgagcctttagcaactagctagattaattaacgcaatctgttattaagttgtctaagcgtcaatttgtttacaccacaatatatcctgccaccagccagccaacagctccccgaccggcagctcggcacaaaatcaccactcgatacaggcagcccatcagaattaattctcatgtttgacagcttatcatcgactgcacggtgcaccaatgcttctggcgtcaggcagccatcggaagctgtggtatggctgtgcaggtcgtaaatcactgcataattcgtgtcgctcaaggcgcactcccgttctggataatgttttttgcgccgacatcataacggttctggcaaatattctgaaatgagctgttgacaattaatcatccggctcgtataatgtgtggaattgtgagcggataacaatttcacacaggaaacagaccatgagggaagcgttgatcgccgaagtatcgactcaactatcagaggtagttggcgtcatcgagcgccatctcgaaccgacgttgctggccgtacatttgtacggctccgcagtggatggcggcctgaagccacacagtgatattgatttgctggttacggtgaccgtaaggcttgatgaaacaacgcggcgagctttgatcaacgaccttttggaaacttcggcttcccctggagagagcgagattctccgcgctgtagaagtcaccattgttgtgcacgacgacatcattccgtggcgttatccagctaagcgcgaactgcaatttggagaatggcagcgcaatgacattcttgcaggtatcttcgagccagccacgatcgacattgatctggctatcttgctgacaaaagcaagagaacatagcgttgccttggtaggtccagcggcggaggaactctttgatccggttcctgaacaggatctatttgaggcgctaaatgaaaccttaacgctatggaactcgccgcccgactgggctggcgatgagcgaaatgtagtgcttacgttgtcccgcatttggtacagcgcagtaaccggcaaaatcgcgccgaaggatgtcgctgccgactgggcaatggagcgcctgccggcccagtatcagcccgtcatacttgaagctaggcaggcttatcttggacaagaagatcgcttggcctcgcgcgcagatcagttggaagaatttgttcactacgtgaaaggcgagatcaccaaagtagtcggcaaataaagctctagtggatctccgtacccagggatctggctcgcggcggacgcacgacgccggggcgagaccataggcgatctcctaaatcaatagtagctgtaacctcgaagcgtttcacttgtaacaacgattgagaatttttgtcataaaattgaaatacttggttcgcatttttgtcatccgcggtcagccgcaattctgacgaactgcccatttagctggagatgattgtacatccttcacgtgaaaatttctcaagcgctgtgaacaagggttcagattttagattgaaaggtgagccgttgaaacacgttcttcttgtcgatgacgacgtcgctatgcggcatcttattattgaataccttacgatccacgccttcaaagtgaccgcggtagccgacagcacccagttcacaagagtactctcttccgcgacggtcgatgtcgtggttgttgatctagatttaggtcgtgaagatgggctcgagatcgttcgtaatctggcggcaaagtctgatattccaatcataattatcagtggcgaccgccttgaggagacggataaagttgttgcactcgagctaggagcaagtgattttatcgctaagccgttcagtatcagagagtttctagcacgcattcgggttgccttgcgcgtgcgccccaacgttgtccgctccaaagaccgacggtctttttgttttactgactggacacttaatctcaggcaacgtcgcttgatgtccgaagctggcggtgaggtgaaacttacggcaggtgagttcaatcttctcctcgcgtttttagagaaaccccgcgacgttctatcgcgcgagcaacttctcattgccagtcgagtacgcgacgaggaggtttatgacaggagtatagatgttctcattttgaggctgcgccgcaaacttgaggcagatccgtcaagccctcaactgataaaaacagcaagaggtgccggttatttctttgacgcggacgtgcaggtttcgcacggggggacgatggcagcctgagccaattcccagatccccgaggaatcggcgtgagcggtcgcaaaccatccggcccggtacaaatcggcgcggcgctgggtgatgacctggtggagaagttgaaggccgcgcaggccgcccagcggcaacgcatcgaggcagaagcacgccccggtgaatcgtggcaagcggccgctgatcgaatccgcaaagaatcccggcaaccgccggcagccggtgcgccgtcgattaggaagccgcccaagggcgacgagcaaccagattttttcgttccgatgctctatgacgtgggcacccgcgatagtcgcagcatcatggacgtggccgttttccgtctgtcgaagcgtgaccgacgagctggcgaggtgatccgctacgagcttccagacgggcacgtagaggtttccgcagggccggccggcatggccagtgtgtgggattacgacctggtactgatggcggtttcccatctaaccgaatccatgaaccgataccgggaagggaagggagacaagcccggccgcgtgttccgtccacacgttgcggacgtactcaagttctgccggcgagccgatggcggaaagcagaaagacgacctggtagaaacctgcattcggttaaacaccacgcacgttgccatgcagcgtacgaagaaggccaagaacggccgcctggtgacggtatccgagggtgaagccttgattagccgctacaagatcgtaaagagcgaaaccgggcggccggagtacatcgagatcgagctggctgattggatgtaccgcgagatcacagaaggcaagaacccggacgtgctgacggttcaccccgattactttttgatcgatcccggcatcggccgttttctctaccgcctggcacgccgcgccgcaggcaaggcagaagccagatggttgttcaagacgatctacgaacgcagtggcagcgccggagagttcaagaagttctgtttcaccgtgcgcaagctgatcgggtcaaatgacctgccggagtacgatttgaaggaggaggcggggcaggctggcccgatcctagtcatgcgctaccgcaacctgatcgagggcgaagcatccgccggttcctaatgtacggagcagatgctagggcaaattgccctagcaggggaaaaaggtcgaaaaggtctctttcctgtggatagcacgtacattgggaacccaaagccgtacattgggaaccggaacccgtacattgggaacccaaagccgtacattgggaaccggtcacacatgtaagtgactgatataaaagagaaaaaaggcgatttttccgcctaaaactctttaaaacttattaaaactcttaaaacccgcctggcctgtgcataactgtctggccagcgcacagccgaagagctgcaaaaagcgcctacccttcggtcgctgcgctccctacgccccgccgcttcgcgtcggcctatcgcggccgctggccgctcaaaaatggctggcctacggccaggcaatctaccagggcgcggacaagccgcgccgtcgccactcgaccgccggcgctgaggtctgcctcgtgaagaaggtgttgctgactcataccaggcctgaatcgccccatcatccagccagaaagtgagggagccacggttgatgagagctttgttgtaggtggaccagttggtgattttgaacttttgctttgccacggaacggtctgcgttgtcgggaagatgcgtgatctgatccttcaactcagcaaaagttcgatttattcaacaaagccgccgtcccgtcaagtcagcgtaatgctctgccagtgttacaaccaattaaccaattctgattagaaaaactcatcgagcatcaaatgaaactgcaatttattcatatcaggattatcaataccatatttttgaaaaagccgtttctgtaatgaaggagaaaactcaccgaggcagttccataggatggcaagatcctggtatcggtctgcgattccgactcgtccaacatcaatacaacctattaatttcccctcgtcaaaaataaggttatcaagtgagaaatcaccatgagtgacgactgaatccggtgagaatggcaaaagctctgcattaatgaatcggccaacgcgcggggagaggcggtttgcgtattgggcgctcttccgcttcctcgctcactgactcgctgcgctcggtcgttcggctgcggcgagcggtatcagctcactcaaaggcggtaatacggttatccacagaatcaggggataacgcaggaaagaacatgtgagcaaaaggccagcaaaaggccaggaaccgtaaaaaggccgcgttgctggcgtttttccataggctccgcccccctgacgagcatcacaaaaatcgacgctcaagtcagaggtggcgaaacccgacaggactataaagataccaggcgtttccccctggaagctccctcgtgcgctctcctgttccgaccctgccgcttaccggatacctgtccgcctttctcccttcgggaagcgtggcgctttctcatagctcacgctgtaggtatctcagttcggtgtaggtcgttcgctccaagctgggctgtgtgcacgaaccccccgttcagcccgaccgctgcgccttatccggtaactatcgtcttgagtccaacccggtaagacacgacttatcgccactggcagcagccactggtaacaggattagcagagcgaggtatgtaggcggtgctacagagttcttgaagtggtggcctaactacggctacactagaagaacagtatttggtatctgcgctctgctgaagccagttaccttcggaaaaagagttggtagctcttgatccggcaaacaaaccaccgctggtagcggtggtttttttgtttgcaagcagcagattacgcgcagaaaaaaaggatctcaagaagatcctttgatcttttctacggggtctgacgctcagtggaacgaaaactcacgttaagggattttggtcatgagattatcaaaaaggatcttcacctagatccttttgatccggaatta

SEQ ID NO: 113 - DNA, 14466 bp, Artificial Sequence
  23718 vector
attcctgtggttggcatgcacatacaaatggacgaacggataaaccttttcacgcccttttaaatatccgattattctaataaacgctcttttctcttaggtttacccgccaatatatcctgtcaaacactgatagtttaaactggcactagcctaacggtgttgactaactaggccgcttccctaattagctaacccgggggcgcgccgggaccctaattagctaaggtacctgcagtgcagcgtgacccggtcgtgcccctctctagagataatgagcattgcatgtctaagttataaaaaattaccacatattttttttgtcacacttgtttgaagtgcagtttatctatctttatacatatatttaaactttactctacgaataatataatctatagtactacaataatatcagtgttttagagaatcatataaatgaacagttagacatggtctaaaggacaattgagtattttgacaacaggactctacagttttatctttttagtgtgcatgtgttctcctttttttttgcaaatagcttcacctatataatacttcatccattttattagtacatccatttagggtttagggttaatggtttttatagactaatttttttagtacatctattttattctattttagcctctaaattaagaaaactaaaactctattttagtttttttatttaataatttagatataaaatagaataaaataaagtgactaaaaattaaacaaataccctttaagaaattaaaaaaactaaggaaacatttttcttgtttcgagtagataatgccagcctgttaaacgccgtcgacgagtctaacggacaccaaccagcgaaccagcagcgtcgcgtcgggccaagcgaagcagacggcacggcatctctgtcgctgcctctggacccctctcgagagttccgctccaccgttggacttgctccgctgtcggcatccagaaattgcgtggcggagcggcagacgtgagccggcacggcaggcggcctcctcctcctctcacggcaccggcagctacgggggattcctttcccaccgctccttcgctttcccttcctcgcccgccgtaataaatagacaccccctccacaccctctttccccaacctcgtgttgttcggagcgcacacacacacaaccagatctcccccaaatccacccgtcggcacctccgcttcctaggtacgccgctcgtcctccccccccccccctctctaccttctctagatcggcgttccggtccatagttagggcccggtagttctacttctgttcatgtttgtgttagatccgtgtttgtgttagatccgtgctgctagcgttcgtacacggatgcgacctgtacgtcagacacgttctgattgctaacttgccagtgtttctctttggggaatcctgggatggctctagccgttccgcagacgggatcgatttcatgattttttttgtttcgttgcatagggtttggtttgcccttttcctttatttcaatatatgccgtgcacttgtttgtcgggtcatcttttcatgcttttttttgtcttggttgtgatgatgtggtctggttgggcggtcgttctagatcggagtagaattctgtttcaaactacctggtggatttattaattttggatctgtatgtgtgtgccatacatattcatagttacgaattgaagatgatggatggaaatatcgatctaggataggtatacatgttgatgcgggttttactgatgcatatacagagatgctttttgttcgcttggttgtgatgatgtggtgtggttgggcggtcgttcattcgttctagatcggagtagaatactgtttcaaactacctggtgtatttattaattttggaactgtatgtgtgtgtcatacatcttcatagttacgagtttaagatggatggaaatatcgatctaggataggtatacatgttgatgtgggttttactgatgcatatacatgatggcatatgcagcatctattcatatgctctaaccttgagtacctatctattataataaacaagtatgttttataattattttgatcttgatatacttggatgatggcatatccagcagctatatgtggatttttttagccctgccttcatacgctatttatttgcttggtactgtttcttttgtcgatgctcaccctgttgtttggtgttacttctgcaggatcctctaagtagcagccatgaacaagaacaacaccaagctgagcacccgcgccctgccgagcttcatcgactacttcaacggcatctacggcttcgccaccggcatcaaggacatcatgaacatgatcttcaagaccgacaccggcggcgacctgaccctggacgagatcctgaagaaccagcagctgctgaacgacatcagcggcaagctggacggcgtgaacggcagcctgaacgacctgatcgcccagggcaacctgaacaccgagctgagcaaggagatccttaagatcgccaacgagcagaaccaggtgctgaacgacgtgaacaacaagctggacgccatcaacaccatgctgcgcgtgtacctgccgaagatcaccagcatgctgagcgacgtgattaagcagaactacgccctgagcctgcagatcgagtacctgagcaagcagctgcaggagatcagcgacaagctggacatcatcaacgtgaacgtcctgatcaacagcaccctgaccgagatcaccccggcctaccagcgcatcaagtacgtgaacgagaagttcgaagagctgaccttcgccaccgagaccagcagcgctgagatattagaggaaactgaagacggcagcccggccgacatcctggacgagctgaccgagctgaccgagctggcgaagagcgtgaccaagaacgacgtggacggcttcgagttctacctgaacaccttccacgacgtgatggtgggcaacaacctgttcggccgcagcgccctgaagaccgccagcgagctgatcaccaaggagaacgtgaagaccagcggcagcgaggtgggcaacgtgtacaacttcctgatcgtgctgaccgccctgcaggcccaggccttcctgaccctgaccacctgtcgcaagctgctgggcctggccgacatcgactacaccagcatcatgaacgagcacttgaacaaggagaaggaggagttccgcgtgaacatcctgccgaccctgagcaacaccttcagcaacccgaactacgccaaggtgaagggcagcgacgaggacgccaagatgatcgtggaggctaagccgggccacgcgttgatcggcttcgagatcagcaacgacagcatcaccgtgctgaaggtgtacgaggccaagctgaagcagaactaccaggtggacaaggacagcttgagcgaggtgatctacggcgacatggacaagctgctgtgtccggaccagagcgagcaaatctactacaccaacaacatcgtgttcccgaacgagtacgtgatcaccaagatcgacttcaccaagaagatgaagaccctgcgctacgaggtgaccgccaacttctacgacagcagcaccggcgagatcgacctgaacaagaagaaggtggagagcagcgaggccgagtaccgcaccctgagcgcgaacgacgacggcgtctacatgccactgggcgtgatcagcgagaccttcctgaccccgatcaacggctttggcctgcaggccgacgagaacagccgcctgatcaccctgacctgtaagagctacctgcgcgagctgctgctagccaccgacctgagcaacaaggagaccaagctgatcgtgccaccgagcggcttcatcagcaacatcgtggagaacggcagcatcgaggaggacaacctggagccgtggaaggccaacaacaagaacgcctacgtcgaccacaccggcggcgtgaacggcaccaaggccctgtacgtgcacaaggacggcggcatcagccagttcatcggcgacaagctgaagccgaagaccgagtacgtgatccagtacaccgtgaagggcaagccatcgattcacctgaaggacgagaacaccggctacatccactacgaggacaccaacaacaacctggaggactaccagaccatcaacaagcgcttcaccaccggcaccgacctgaagggcgtgtacctgatcctgaagagccagaacggcgacgaggcctggggcgacaacttcatcatcctggagatcagcccgagcgagaagctgctgagcccggagctgatcaacaccaacaactggaccagcaccggcagcaccaacatcagcggcaacaccctgaccctgtaccagggcggccgcggcatcctgaagcagaacctgcagctggacagcttcagcacctaccgcgtgtacttcagcgtgagcggcgacgccaacgtgcgcatccgcaactcccgcgaggtgctgttcgagaagaggtacatgagcggcgccaaggacgtgagcgagatgttcaccaccaagttcgagaaggacaacttctacatcgagctgagccagggcaacaacctgtacggcggcccgatcgtgcacttctacgacgtgagcatcaagtaggagctctagatcttatctgcacaaagtggagtagtcagtcatcgatcaggaaccagacaccagacttttattcatacagtgaagtgaagtgaagtgcagtgcagtgagttgctggtttttgtacaacttagtatgtatttgtatttgtaaaatacttctatcaataaaatttctaattcctaaaaccaaaatccaggctacacggaccgcgatcgcttaattaagcttgcatgcctgcagtgcagcgtgacccggtcgtgcccctctctagagataatgagcattgcatgtctaagttataaaaaattaccacatattttttttgtcacacttgtttgaagtgcagtttatctatctttatacatatatttaaactttactctacgaataatataatctatagtactacaataatatcagtgttttagagaatcatataaatgaacagttagacatggtctaaaggacaattgagtattttgacaacaggactctacagttttatctttttagtgtgcatgtgttctcctttttttttgcaaatagcttcacctatataatacttcatccattttattagtacatccatttagggtttagggttaatggtttttatagactaatttttttagtacatctattttattctattttagcctctaaattaagaaaactaaaactctattttagtttttttatttaataatttagatataaaatagaataaaataaagtgactaaaaattaaacaaataccctttaagaaattaaaaaaactaaggaaacatttttcttgtttcgagtagataatgccagcctgttaaacgccgccgacgagtctaacggacaccaaccagcgaaccagcagcgtcgcgtcgggccaagcgaagcagacggcacggcatctctgtcgctgcctctggacccctctcgagagttccgctccaccgttggacttgctccgctgtcggcatccagaaattgcgtggcggagcggcagacgtgagccggcacggcaggcggcctcctcctcctctcacggcaccggcagctacgggggattcctttcccaccgctccttcgctttcccttcctcgcccgccgtaataaatagacaccccctccacaccctctttccccaacctcgtgttgttcggagcgcacacacacacaaccagatctcccccaaatccacccgtcggcacctccgcttcaaggtacgccgctcgtcctccccccccccccctctctaccttctctagatcggcgttccggtccatagttagggcccggtagttctacttctgttcatgtttgtgttagatccgtgtttgtgttagatccgtgctgttagcgttcgtacacggatgcgacctgtacgtcagacacgttctgattgctaacttgccagtgtttctctttggggaatcctgggatggctctagccgttccgcagacgggatcgatttcatgattttttttgtttcgttgcatagggtttggtttgcccttttcctttatttcaatatatgccgtgcacttgtttgtcgggtcatcttttcatgcttttttttgtcttggttgtgatgatgtggtctggttgggcggtcgttctagatcggagtagaattctgtttcaaactacctggtggatttattaattttggatctgtatgtgtgtgccatacatattcatagttacgaattgaagatgatggatggaaatatcgatctaggataggtatacatgttgatgcgggttttactgatgcatatacagagatgctttttgttcgcttggttgtgatgatgtggtgtggttgggcggtcgttcattcgttctagatcggagtagaatactgtttcaaactacctggtgtatttattaattttggaactgtatgtgtgtgtcatacatcttcatagttacgagtttaagatggatggaaatatcgatctaggataggtatacatgttgatgtgggttttactgatgcatatacatgatggcatatgcagcatctattcatatgctctaaccttgagtacctatctattataataaacaagtatgttttataattattttgatcttgatatacttggatgatggcatatgcagcagctatatgtggatttttttagccctgccttcatacgctatttatttgcttggtactgtttcttttgtcgatgctcaccctgttgtttggtgttacttctgcagggatctccgatcatgcaaaaactcattaactcagtgcaaaactatgcctggggcagcaaaacggcgttgactgaactttatggtatggaaaatccgtccagccagccgatggccgagctgtggatgggcgcacatccgaaaagcagttcacgagtgcagaatgccgccggagatatcgtttcactgcgtgatgtgattgagagtgataaatcgactctgctcggagaggccgttgccaaacgctttggcgaactgcctttcctgttcaaagtattatgcgcagcacagccactctccattcaggttcatccaaacaaacacaattctgaaatcggttttgccaaagaaaatgccgcaggtatcccgatggatgccgccgagcgtaactataaagatcctaaccacaagccggagctggtttttgcgctgacgcctttccttgcgatgaacgcgtttcgtgaattttccgagattgtctccctactccagccggtcgcaggtgcacatccggcgattgctcactttttacaacagcctgatgccgaacgtttaagcgaactgttcgccagcctgttgaatatgcagggtgaagaaaaatcccgcgcgctggcgattttaaaatcggccctcgatagccagcagggtgaaccgtggcaaacgattcgtttaatttctgaattttacccggaagacagcggtctgttctccccgctattgctgaatgtggtgaaattgaaccctggcgaagcgatgttcctgttcgctgaaacaccgcacgcttacctgcaaggcgtggcgctggaagtgatggcaaactccgataacgtgctgcgtgcgggtctgacgcctaaatacattgatattccggaactggttgccaatgtgaaattcgaagccaaaccggctaaccagttgttgacccagccggtgaaacaaggtgcagaactggacttcccgattccagtggatgattttgccttctcgctgcatgaccttagtgataaagaaaccaccattagccagcagagtgccgccattttgttctgcgtcgaaggcgatgcaacgttgtggaaaggttctcagcagttacagcttaaaccgggtgaatcagcgtttattgccgccaacgaatcaccggtgactgtcaaaggccacggccgtttagcgcgtgtttacaacaagctgtaagagcttactgaaaaaattaacatctcttgctaagctgggtcatgggtcgtttaagctgccgatgtgcctgcgtcgtctggtgccctctctccatatggaggttgtcaaagtatctgctgttcgtgtcatgagtcgtgtcagtgttggtttaataatggaccggttgtgttgtgtgtgcgtactacccagaactatgacaaatcatgaataagtttgatgtttgaaattaaagcctgtgctcattatgttctgtctttcagttgtctcctaatatttgcctccaggtactggctatctaccgtttcttacttaggaggtgtttgaatgcactaaaactaatagttagtggctaaaattagttaaaacatccaaacaccatagctaatagttgaactattagctatttttggaaaattagttaatagtgaggtagttatttgttagctagctaattcaactaacaatttttagccaactaacaattagtttcagtgcattcaaacacccccttaatgttaacgtggttctatctaccgtctcctaatatatggttgattgttcggtttgttgctatgctattgggttctgattgctgctagttcttgctgaatccagaagttctcgtagtatagctcagattcatattatttatttgagtgataagtgatccaggttattactatgttagctaggttttttttacaaggataaattatctgtgatcataattcttatgaaagctttatgtttcctggaggcagtggcatgcaatgcatgacagcaacttgatcacaccagctgaggtagatacggtaacaaggttcttaaatctgttcaccaaatcattggagaacacacatacacattcttgccagtcttggttagagaaatttcatgacaaaatgccaaagctgtcttgactcttcacttttggccatgagtcgtgacttagtttggtttaatggaccggttctcctagcttgttctactcaaaactgttgttgatgcgaataagttgtgatggttgatctctggattttgttttgctctcaatagtggacgagattagatagcctgcaggcccgggggcgcgccctaattagctaacggccaggatcgccgcgtgagcctttagcaactagctagattaattaacgcaatctgttattaagttgtctaagcgtcaatttgtttacaccacaatatatcctgccaccagccagccaacagctccccgaccggcagctcggcacaaaatcaccactcgatacaggcagcccatcagaattaattctcatgtttgacagcttatcatcgactgcacggtgcaccaatgcttctggcgtcaggcagccatcggaagctgtggtatggctgtgcaggtcgtaaatcactgcataattcgtgtcgctcaaggcgcactcccgttctggataatgttttttgcgccgacatcataacggttctggcaaatattctgaaatgagctgttgacaattaatcatccggctcgtataatgtgtggaattgtgagcggataacaatttcacacaggaaacagaccatgagggaagcgttgatcgccgaagtatcgactcaactatcagaggtagttggcgtcatcgagcgccatctcgaaccgacgttgctggccgtacatttgtacggctccgcagtggatggcggcctgaagccacacagtgatattgatttgctggttacggtgaccgtaaggcttgatgaaacaacgcggcgagctttgatcaacgaccttttggaaacttcggcttcccctggagagagcgagattctccgcgctgtagaagtcaccattgttgtgcacgacgacatcattccgtggcgttatccagctaagcgcgaactgcaatttggagaatggcagcgcaatgacattcttgcaggtatcttcgagccagccacgatcgacattgatctggctatcttgctgacaaaagcaagagaacatagcgttgccttggtaggtccagcggcggaggaactctttgatccggttcctgaacaggatctatttgaggcgctaaatgaaaccttaacgctatggaactcgccgcccgactgggctggcgatgagcgaaatgtagtgcttacgttgtcccgcatttggtacagcgcagtaaccggcaaaatcgcgccgaaggatgtcgctgccgactgggcaatggagcgcctgccggcccagtatcagcccgtcatacttgaagctaggcaggcttatcttggacaagaagatcgcttggcctcgcgcgcagatcagttggaagaatttgttcactacgtgaaaggcgagatcaccaaagtagtcggcaaataaagctctagtggatctccgtacccagggatctggctcgcggcggacgcacgacgccggggcgagaccataggcgatctcctaaatcaatagtagctgtaacctcgaagcgtttcacttgtaacaacgattgagaatttttgtcataaaattgaaatacttggttcgcatttttgtcatccgcggtcagccgcaattctgacgaactgcccatttagctggagatgattgtacatccttcacgtgaaaatttctcaagcgctgtgaacaagggttcagattttagattgaaaggtgagccgttgaaacacgttcttcttgtcgatgacgacgtcgctatgcggcatcttattattgaataccttacgatccacgccttcaaagtgaccgcggtagccgacagcacccagttcacaagagtactctcttccgcgacggtcgatgtcgtggttgttgatctagatttaggtcgtgaagatgggctcgagatcgttcgtaatctggcggcaaagtctgatattccaatcataattatcagtggcgaccgccttgaggagacggataaagttgttgcactcgagctaggagcaagtgattttatcgctaagccgttcagtatcagagagtttctagcacgcattcgggttgccttgcgcgtgcgccccaacgttgtccgctccaaagaccgacggtctttttgttttactgactggacacttaatctcaggcaacgtcgcttgatgtccgaagctggcggtgaggtgaaacttacggcaggtgagttcaatcttctcctcgcgtttttagagaaaccccgcgacgttctatcgcgcgagcaacttctcattgccagtcgagtacgcgacgaggaggtttatgacaggagtatagatgttctcattttgaggctgcgccgcaaacttgaggcagatccgtcaagccctcaactgataaaaacagcaagaggtgccggttatttctttgacgcggacgtgcaggtttcgcacggggggacgatggcagcctgagccaattcccagatccccgaggaatcggcgtgagcggtcgcaaaccatccggcccggtacaaatcggcgcggcgctgggtgatgacctggtggagaagttgaaggccgcgcaggccgcccagcggcaacgcatcgaggcagaagcacgccccggtgaatcgtggcaagcggccgctgatcgaatccgcaaagaatcccggcaaccgccggcagccggtgcgccgtcgattaggaagccgcccaagggcgacgagcaaccagattttttcgttccgatgctctatgacgtgggcacccgcgatagtcgcagcatcatggacgtggccgttttccgtctgtcgaagcgtgaccgacgagctggcgaggtgatccgctacgagcttccagacgggcacgtagaggtttccgcagggccggccggcatggccagtgtgtgggattacgacctggtactgatggcggtttcccatctaaccgaatccatgaaccgataccgggaagggaagggagacaagcccggccgcgtgttccgtccacacgttgcggacgtactcaagttctgccggcgagccgatggcggaaagcagaaagacgacctggtagaaacctgcattcggttaaacaccacgcacgttgccatgcagcgtacgaagaaggccaagaacggccgcctggtgacggtatccgagggtgaagccttgattagccgctacaagatcgtaaagagcgaaaccgggcggccggagtacatcgagatcgagctggctgattggatgtaccgcgagatcacagaaggcaagaacccggacgtgctgacggttcaccccgattactttttgatcgatcccggcatcggccgttttctctaccgcctggcacgccgcgccgcaggcaaggcagaagccagatggttgttcaagacgatctacgaacgcagtggcagcgccggagagttcaagaagttctgtttcaccgtgcgcaagctgatcgggtcaaatgacctgccggagtacgatttgaaggaggaggcggggcaggctggcccgatcctagtcatgcgctaccgcaacctgatcgagggcgaagcatccgccggttcctaatgtacggagcagatgctagggcaaattgccctagcaggggaaaaaggtcgaaaaggtctctttcctgtggatagcacgtacattgggaacccaaagccgtacattgggaaccggaacccgtacattgggaacccaaagccgtacattgggaaccggtcacacatgtaagtgactgatataaaagagaaaaaaggcgatttttccgcctaaaactctttaaaacttattaaaactcttaaaacccgcctggcctgtgcataactgtctggccagcgcacagccgaagagctgcaaaaagcgcctacccttcggtcgctgcgctccctacgccccgccgcttcgcgtcggcctatcgcggccgctggccgctcaaaaatggctggcctacggccaggcaatctaccagggcgcggacaagccgcgccgtcgccactcgaccgccggcgctgaggtctgcctcgtgaagaaggtgttgctgactcataccaggcctgaatcgccccatcatccagccagaaagtgagggagccacggttgatgagagctttgttgtaggtggaccagttggtgattttgaacttttgctttgccacggaacggtctgcgttgtcgggaagatgcgtgatctgatccttcaactcagcaaaagttcgatttattcaacaaagccgccgtcccgtcaagtcagcgtaatgctctgccagtgttacaaccaattaaccaattctgattagaaaaactcatcgagcatcaaatgaaactgcaatttattcatatcaggattatcaataccatatttttgaaaaagccgtttctgtaatgaaggagaaaactcaccgaggcagttccataggatggcaagatcctggtatcggtctgcgattccgactcgtccaacatcaatacaacctattaatttcccctcgtcaaaaataaggttatcaagtgagaaatcaccatgagtgacgactgaatccggtgagaatggcaaaagctctgcattaatgaatcggccaacgcgcggggagaggcggtttgcgtattgggcgctcttccgcttcctcgctcactgactcgctgcgctcggtcgttcggctgcggcgagcggtatcagctcactcaaaggcggtaatacggttatccacagaatcaggggataacgcaggaaagaacatgtgagcaaaaggccagcaaaaggccaggaaccgtaaaaaggccgcgttgctggcgtttttccataggctccgcccccctgacgagcatcacaaaaatcgacgctcaagtcagaggtggcgaaacccgacaggactataaagataccaggcgtttccccctggaagctccctcgtgcgctctcctgttccgaccctgccgcttaccggatacctgtccgcctttctcccttcgggaagcgtggcgctttctcatagctcacgctgtaggtatctcagttcggtgtaggtcgttcgctccaagctgggctgtgtgcacgaaccccccgttcagcccgaccgctgcgccttatccggtaactatcgtcttgagtccaacccggtaagacacgacttatcgccactggcagcagccactggtaacaggattagcagagcgaggtatgtaggcggtgctacagagttcttgaagtggtggcctaactacggctacactagaagaacagtatttggtatctgcgctctgctgaagccagttaccttcggaaaaagagttggtagctcttgatccggcaaacaaaccaccgctggtagcggtggtttttttgtttgcaagcagcagattacgcgcagaaaaaaaggatctcaagaagatcctttgatcttttctacggggtctgacgctcagtggaacgaaaactcacgttaagggattttggtcatgagattatcaaaaaggatcttcacctagatccttttgatccggaatta

SEQ ID NO: 114 - protein, 789 aa, Artificial Sequence
  23705 Vip3
MNKNNTKLSTRALPSFIDYFNGIYGFATGIKDIMNMIFKTDTGGDLTLDEILKNQQLLNDISGKLDGVNGSLNDLIAQGNLNTELSKEILKIANEQNQVLNDVNNKLDAINTMLRVYLPKITSMLSDVIKQNYALSLQIEYLSKQLQEISDKLDIINVNVLINSTLTEITPAYQRIKYVNEKFEELTFATETSSKVKKDGSPADILDELTELTELAKSVTKNDVDGFEFYLNTFHDVMVGNNLFGRSALKTASELITKENVKTSGSEVGNVYNFLIVLTALQAQAFLTLTTCRKLLGLADIDYTSIMNEHLNKEKEEFRVNILPTLSNTFSNPNYAKVKGSDEDAKMIVEAKPGHALIGFEISNDSITVLKVYEAKLKQNYQVDKDSLSEVIYGDMDKLLCPDQSEQIYYTNNIVFPNEYVITKIDFTKKMKTLRYEVTANFYDSSTGEIDLNKKKVESSEAEYRTLSANDDGVYMPLGVISETFLTPINGFGLQADENSRLITLTCKSYLRELLLATDLSNKETKLIVPPSGFISNIVENGSIEEDNLEPWKANNKNAYVDHTGGVNGTKALYVHKDGGISQFIGDKLKPKTEYVIQYTVKGKPSIHLKDENTGYIHYEDTNNNLEDYQTINKRFTTGTDLKGVYLILKSQNGDEAWGDNFIILEISPSEKLLSPELINTNNWTSTGSTNISGNTLTLYQGGRGILKQNLQLDSFSTYRVYFSVSGDANVRIRNSREVLFEKRYMSGAKDVSEMFTTKFEKDNFYIELSQGNNLYGGPIVHFYDVSIK

SEQ ID NO: 115 - protein, 807 aa, Artificial Sequence
  23716 Vip3
MYTHTHVEILEETEELRHINKNNTKLSTRALPSFIDYFNGIYGFATGIKDIMNMIFKTDTGGDLTLDEILKNQQLLNDISGKLDGVNGSLNDLIAQGNLNTELSKEILKIANEQNQVLNDVNNKLDAINTMLRVYLPKITSMLSDVIKQNYALSLQIEYLSKQLQEISDKLDIINVNVLINSTLTEITPAYQRIKYVNEKFEELTFATETSSKVKKDGSPADILDELTELTELAKSVTKNDVDGFEFYLNTFHDVMVGNNLFGRSALKTASELITKENVKTSGSEVGNVYNFLIVLTALQAQAFLTLTTCRKLLGLADIDYTSIMNEHLNKEKEEFRVNILPTLSNTFSNPNYAKVKGSDEDAKMIVEAKPGHALIGFEISNDSITVLKVYEAKLKQNYQVDKDSLSEVIYGDMDKLLCPDQSEQIYYTNNIVFPNEYVITKIDFTKKMKTLRYEVTANFYDSSTGEIDLNKKKVESSEAEYRTLSANDDGVYMPLGVISETFLTPINGFGLQADENSRLITLTCKSYLRELLLATDLSNKETKLIVPPSGFISNIVENGSIEEDNLEPWKANNKNAYVDHTGGVNGTKALYVHKDGGISQFIGDKLKPKTEYVIQYTVKGKPSIHLKDENTGYIHYEDTNNNLEDYQTINKRFTTGTDLKGVYLILKSQNGDEAWGDNFIILEISPSEKLLSPELINTNNWTSTGSTNISGNTLTLYQGGRGILKQNLQLDSFSTYRVYFSVSGDANVRIRNSREVLFEKRYMSGAKDVSEMFTTKFEKDNFYIELSQGNNLYGGPIVHFYDVSIK

SEQ ID NO: 116 - protein, 797 aa, Artificial Sequence
  23717 Vip3
MAEILEETENKNNTKLSTRALPSFIDYFNGIYGFATGIKDIMNMIFKTDTGGDLTLDEILKNQQLLNDISGKLDGVNGSLNDLIAQGNLNTELSKEILKIANEQNQVLNDVNNKLDAINTMLRVYLPKITSMLSDVIKQNYALSLQIEYLSKQLQEISDKLDIINVNVLINSTLTEITPAYQRIKYVNEKFEELTFATETSSKVKKDGSPADILDELTELTELAKSVTKNDVDGFEFYLNTFHDVMVGNNLFGRSALKTASELITKENVKTSGSEVGNVYNFLIVLTALQAQAFLTLTTCRKLLGLADIDYTSIMNEHLNKEKEEFRVNILPTLSNTFSNPNYAKVKGSDEDAKMIVEAKPGHALIGFEISNDSITVLKVYEAKLKQNYQVDKDSLSEVIYGDMDKLLCPDQSEQIYYTNNIVFPNEYVITKIDFTKKMKTLRYEVTANFYDSSTGEIDLNKKKVESSEAEYRTLSANDDGVYMPLGVISETFLTPINGFGLQADENSRLITLTCKSYLRELLLATDLSNKETKLIVPPSGFISNIVENGSIEEDNLEPWKANNKNAYVDHTGGVNGTKALYVHKDGGISQFIGDKLKPKTEYVIQYTVKGKPSIHLKDENTGYIHYEDTNNNLEDYQTINKRFTTGTDLKGVYLILKSQNGDEAWGDNFIILEISPSEKLLSPELINTNNWTSTGSTNISGNTLTLYQGGRGILKQNLQLDSFSTYRVYFSVSGDANVRIRNSREVLFEKRYMSGAKDVSEMFTTKFEKDNFYIELSQGNNLYGGPIVHFYDVSIK

SEQ ID NO: 117 - protein, 793 aa, Artificial Sequence
  23718 Vip3
MNKNNTKLSTRALPSFIDYFNGIYGFATGIKDIMNMIFKTDTGGDLTLDEILKNQQLLNDISGKLDGVNGSLNDLIAQGNLNTELSKEILKIANEQNQVLNDVNNKLDAINTMLRVYLPKITSMLSDVIKQNYALSLQIEYLSKQLQEISDKLDIINVNVLINSTLTEITPAYQRIKYVNEKFEELTFATETSSAEILEETEDGSPADILDELTELTELAKSVTKNDVDGFEFYLNTFHDVMVGNNLFGRSALKTASELITKENVKTSGSEVGNVYNFLIVLTALQAQAFLTLTTCRKLLGLADIDYTSIMNEHLNKEKEEFRVNILPTLSNTFSNPNYAKVKGSDEDAKMIVEAKPGHALIGFEISNDSITVLKVYEAKLKQNYQVDKDSLSEVIYGDMDKLLCPDQSEQIYYTNNIVFPNEYVITKIDFTKKMKTLRYEVTANFYDSSTGEIDLNKKKVESSEAEYRTLSANDDGVYMPLGVISETFLTPINGFGLQADENSRLITLTCKSYLRELLLATDLSNKETKLIVPPSGFISNIVENGSIEEDNLEPWKANNKNAYVDHTGGVNGTKALYVHKDGGISQFIGDKLKPKTEYVIQYTVKGKPSIHLKDENTGYIHYEDTNNNLEDYQTINKRFTTGTDLKGVYLILKSQNGDEAWGDNFIILEISPSEKLLSPELINTNNWTSTGSTNISGNTLTLYQGGRGILKQNLQLDSFSTYRVYFSVSGDANVRIRNSREVLFEKRYMSGAKDVSEMFTTKFEKDNFYIELSQGNNLYGGPIVHFYDVSIK

SEQ ID NO: 118 - DNA, 2370 bp, Artificial Sequence
  23705 vip3 coding sequence
atgaacaagaacaacaccaagctgagcacccgcgccctgccgagcttcatcgactacttcaacggcatctacggcttcgccaccggcatcaaggacatcatgaacatgatcttcaagaccgacaccggcggcgacctgaccctggacgagatcctgaagaaccagcagctgctgaacgacatcagcggcaagctggacggcgtgaacggcagcctgaacgacctgatcgcccagggcaacctgaacaccgagctgagcaaggagatccttaagatcgccaacgagcagaaccaggtgctgaacgacgtgaacaacaagctggacgccatcaacaccatgctgcgcgtgtacctgccgaagatcaccagcatgctgagcgacgtgattaagcagaactacgccctgagcctgcagatcgagtacctgagcaagcagctgcaggagatcagcgacaagctggacatcatcaacgtgaacgtcctgatcaacagcaccctgaccgagatcaccccggcctaccagcgcatcaagtacgtgaacgagaagttcgaagagctgaccttcgccaccgagaccagcagcaaggtgaagaaggacggcagcccggccgacatcctggacgagctgaccgagctgaccgagctggcgaagagcgtgaccaagaacgacgtggacggcttcgagttctacctgaacaccttccacgacgtgatggtgggcaacaacctgttcggccgcagcgccctgaagaccgccagcgagctgatcaccaaggagaacgtgaagaccagcggcagcgaggtgggcaacgtgtacaacttcctgatcgtgctgaccgccctgcaggcccaggccttcctgaccctgaccacctgtcgcaagctgctgggcctggccgacatcgactacaccagcatcatgaacgagcacttgaacaaggagaaggaggagttccgcgtgaacatcctgccgaccctgagcaacaccttcagcaacccgaactacgccaaggtgaagggcagcgacgaggacgccaagatgatcgtggaggctaagccgggccacgcgttgatcggcttcgagatcagcaacgacagcatcaccgtgctgaaggtgtacgaggccaagctgaagcagaactaccaggtggacaaggacagcttgagcgaggtgatctacggcgacatggacaagctgctgtgtccggaccagagcgagcaaatctactacaccaacaacatcgtgttcccgaacgagtacgtgatcaccaagatcgacttcaccaagaagatgaagaccctgcgctacgaggtgaccgccaacttctacgacagcagcaccggcgagatcgacctgaacaagaagaaggtggagagcagcgaggccgagtaccgcaccctgagcgcgaacgacgacggcgtctacatgccactgggcgtgatcagcgagaccttcctgaccccgatcaacggctttggcctgcaggccgacgagaacagccgcctgatcaccctgacctgtaagagctacctgcgcgagctgctgctagccaccgacctgagcaacaaggagaccaagctgatcgtgccaccgagcggcttcatcagcaacatcgtggagaacggcagcatcgaggaggacaacctggagccgtggaaggccaacaacaagaacgcctacgtcgaccacaccggcggcgtgaacggcaccaaggccctgtacgtgcacaaggacggcggcatcagccagttcatcggcgacaagctgaagccgaagaccgagtacgtgatccagtacaccgtgaagggcaagccatcgattcacctgaaggacgagaacaccggctacatccactacgaggacaccaacaacaacctggaggactaccagaccatcaacaagcgcttcaccaccggcaccgacctgaagggcgtgtacctgatcctgaagagccagaacggcgacgaggcctggggcgacaacttcatcatcctggagatcagcccgagcgagaagctgctgagcccggagctgatcaacaccaacaactggaccagcaccggcagcaccaacatcagcggcaacaccctgaccctgtaccagggcggccgcggcatcctgaagcagaacctgcagctggacagcttcagcacctaccgcgtgtacttcagcgtgagcggcgacgccaacgtgcgcatccgcaactcccgcgaggtgctgttcgagaagaggtacatgagcggcgccaaggacgtgagcgagatgttcaccaccaagttcgagaaggacaacttctacatcgagctgagccagggcaacaacctgtacggcggcccgatcgtgcacttctacgacgtgagcatcaagtag

SEQ ID NO: 119 - DNA, 2424 bp, Artificial Sequence
  23716 vip3 coding sequence
atgtatacgcacacacatgttgagatattagaggaaactgaagaattacgccacattaacaagaacaacaccaagctgagcacccgcgccctgccgagcttcatcgactacttcaacggcatctacggcttcgccaccggcatcaaggacatcatgaacatgatcttcaagaccgacaccggcggcgacctgaccctggacgagatcctgaagaaccagcagctgctgaacgacatcagcggcaagctggacggcgtgaacggcagcctgaacgacctgatcgcccagggcaacctgaacaccgagctgagcaaggagatccttaagatcgccaacgagcagaaccaggtgctgaacgacgtgaacaacaagctggacgccatcaacaccatgctgcgcgtgtacctgccgaagatcaccagcatgctgagcgacgtgattaagcagaactacgccctgagcctgcagatcgagtacctgagcaagcagctgcaggagatcagcgacaagctggacatcatcaacgtgaacgtcctgatcaacagcaccctgaccgagatcaccccggcctaccagcgcatcaagtacgtgaacgagaagttcgaagagctgaccttcgccaccgagaccagcagcaaggtgaagaaggacggcagcccggccgacatcctggacgagctgaccgagctgaccgagctggcgaagagcgtgaccaagaacgacgtggacggcttcgagttctacctgaacaccttccacgacgtgatggtgggcaacaacctgttcggccgcagcgccctgaagaccgccagcgagctgatcaccaaggagaacgtgaagaccagcggcagcgaggtgggcaacgtgtacaacttcctgatcgtgctgaccgccctgcaggcccaggccttcctgaccctgaccacctgtcgcaagctgctgggcctggccgacatcgactacaccagcatcatgaacgagcacttgaacaaggagaaggaggagttccgcgtgaacatcctgccgaccctgagcaacaccttcagcaacccgaactacgccaaggtgaagggcagcgacgaggacgccaagatgatcgtggaggctaagccgggccacgcgttgatcggcttcgagatcagcaacgacagcatcaccgtgctgaaggtgtacgaggccaagctgaagcagaactaccaggtggacaaggacagcttgagcgaggtgatctacggcgacatggacaagctgctgtgtccggaccagagcgagcaaatctactacaccaacaacatcgtgttcccgaacgagtacgtgatcaccaagatcgacttcaccaagaagatgaagaccctgcgctacgaggtgaccgccaacttctacgacagcagcaccggcgagatcgacctgaacaagaagaaggtggagagcagcgaggccgagtaccgcaccctgagcgcgaacgacgacggcgtctacatgccactgggcgtgatcagcgagaccttcctgaccccgatcaacggctttggcctgcaggccgacgagaacagccgcctgatcaccctgacctgtaagagctacctgcgcgagctgctgctagccaccgacctgagcaacaaggagaccaagctgatcgtgccaccgagcggcttcatcagcaacatcgtggagaacggcagcatcgaggaggacaacctggagccgtggaaggccaacaacaagaacgcctacgtcgaccacaccggcggcgtgaacggcaccaaggccctgtacgtgcacaaggacggcggcatcagccagttcatcggcgacaagctgaagccgaagaccgagtacgtgatccagtacaccgtgaagggcaagccatcgattcacctgaaggacgagaacaccggctacatccactacgaggacaccaacaacaacctggaggactaccagaccatcaacaagcgcttcaccaccggcaccgacctgaagggcgtgtacctgatcctgaagagccagaacggcgacgaggcctggggcgacaacttcatcatcctggagatcagcccgagcgagaagctgctgagcccggagctgatcaacaccaacaactggaccagcaccggcagcaccaacatcagcggcaacaccctgaccctgtaccagggcggccgcggcatcctgaagcagaacctgcagctggacagcttcagcacctaccgcgtgtacttcagcgtgagcggcgacgccaacgtgcgcatccgcaactcccgcgaggtgctgttcgagaagaggtacatgagcggcgccaaggacgtgagcgagatgttcaccaccaagttcgagaaggacaacttctacatcgagctgagccagggcaacaacctgtacggcggcccgatcgtgcacttctacgacgtgagcatcaagtag

SEQ ID NO: 120 - DNA, 2394 bp, Artificial Sequence
  23717 vip3 coding sequence
atggctgagatattagaggaaactgaaaacaagaacaacaccaagctgagcacccgcgccctgccgagcttcatcgactacttcaacggcatctacggcttcgccaccggcatcaaggacatcatgaacatgatcttcaagaccgacaccggcggcgacctgaccctggacgagatcctgaagaaccagcagctgctgaacgacatcagcggcaagctggacggcgtgaacggcagcctgaacgacctgatcgcccagggcaacctgaacaccgagctgagcaaggagatccttaagatcgccaacgagcagaaccaggtgctgaacgacgtgaacaacaagctggacgccatcaacaccatgctgcgcgtgtacctgccgaagatcaccagcatgctgagcgacgtgattaagcagaactacgccctgagcctgcagatcgagtacctgagcaagcagctgcaggagatcagcgacaagctggacatcatcaacgtgaacgtcctgatcaacagcaccctgaccgagatcaccccggcctaccagcgcatcaagtacgtgaacgagaagttcgaagagctgaccttcgccaccgagaccagcagcaaggtgaagaaggacggcagcccggccgacatcctggacgagctgaccgagctgaccgagctggcgaagagcgtgaccaagaacgacgtggacggcttcgagttctacctgaacaccttccacgacgtgatggtgggcaacaacctgttcggccgcagcgccctgaagaccgccagcgagctgatcaccaaggagaacgtgaagaccagcggcagcgaggtgggcaacgtgtacaacttcctgatcgtgctgaccgccctgcaggcccaggccttcctgaccctgaccacctgtcgcaagctgctgggcctggccgacatcgactacaccagcatcatgaacgagcacttgaacaaggagaaggaggagttccgcgtgaacatcctgccgaccctgagcaacaccttcagcaacccgaactacgccaaggtgaagggcagcgacgaggacgccaagatgatcgtggaggctaagccgggccacgcgttgatcggcttcgagatcagcaacgacagcatcaccgtgctgaaggtgtacgaggccaagctgaagcagaactaccaggtggacaaggacagcttgagcgaggtgatctacggcgacatggacaagctgctgtgtccggaccagagcgagcaaatctactacaccaacaacatcgtgttcccgaacgagtacgtgatcaccaagatcgacttcaccaagaagatgaagaccctgcgctacgaggtgaccgccaacttctacgacagcagcaccggcgagatcgacctgaacaagaagaaggtggagagcagcgaggccgagtaccgcaccctgagcgcgaacgacgacggcgtctacatgccactgggcgtgatcagcgagaccttcctgaccccgatcaacggctttggcctgcaggccgacgagaacagccgcctgatcaccctgacctgtaagagctacctgcgcgagctgctgctagccaccgacctgagcaacaaggagaccaagctgatcgtgccaccgagcggcttcatcagcaacatcgtggagaacggcagcatcgaggaggacaacctggagccgtggaaggccaacaacaagaacgcctacgtcgaccacaccggcggcgtgaacggcaccaaggccctgtacgtgcacaaggacggcggcatcagccagttcatcggcgacaagctgaagccgaagaccgagtacgtgatccagtacaccgtgaagggcaagccatcgattcacctgaaggacgagaacaccggctacatccactacgaggacaccaacaacaacctggaggactaccagaccatcaacaagcgcttcaccaccggcaccgacctgaagggcgtgtacctgatcctgaagagccagaacggcgacgaggcctggggcgacaacttcatcatcctggagatcagcccgagcgagaagctgctgagcccggagctgatcaacaccaacaactggaccagcaccggcagcaccaacatcagcggcaacaccctgaccctgtaccagggcggccgcggcatcctgaagcagaacctgcagctggacagcttcagcacctaccgcgtgtacttcagcgtgagcggcgacgccaacgtgcgcatccgcaactcccgcgaggtgctgttcgagaagaggtacatgagcggcgccaaggacgtgagcgagatgttcaccaccaagttcgagaaggacaacttctacatcgagctgagccagggcaacaacctgtacggcggcccgatcgtgcacttctacgacgtgagcatcaagtag

SEQ ID NO: 121 - DNA, 2382 bp, Artificial Sequence
  23718 vip coding sequence
atgaacaagaacaacaccaagctgagcacccgcgccctgccgagcttcatcgactacttcaacggcatctacggcttcgccaccggcatcaaggacatcatgaacatgatcttcaagaccgacaccggcggcgacctgaccctggacgagatcctgaagaaccagcagctgctgaacgacatcagcggcaagctggacggcgtgaacggcagcctgaacgacctgatcgcccagggcaacctgaacaccgagctgagcaaggagatccttaagatcgccaacgagcagaaccaggtgctgaacgacgtgaacaacaagctggacgccatcaacaccatgctgcgcgtgtacctgccgaagatcaccagcatgctgagcgacgtgattaagcagaactacgccctgagcctgcagatcgagtacctgagcaagcagctgcaggagatcagcgacaagctggacatcatcaacgtgaacgtcctgatcaacagcaccctgaccgagatcaccccggcctaccagcgcatcaagtacgtgaacgagaagttcgaagagctgaccttcgccaccgagaccagcagcgctgagatattagaggaaactgaagacggcagcccggccgacatcctggacgagctgaccgagctgaccgagctggcgaagagcgtgaccaagaacgacgtggacggcttcgagttctacctgaacaccttccacgacgtgatggtgggcaacaacctgttcggccgcagcgccctgaagaccgccagcgagctgatcaccaaggagaacgtgaagaccagcggcagcgaggtgggcaacgtgtacaacttcctgatcgtgctgaccgccctgcaggcccaggccttcctgaccctgaccacctgtcgcaagctgctgggcctggccgacatcgactacaccagcatcatgaacgagcacttgaacaaggagaaggaggagttccgcgtgaacatcctgccgaccctgagcaacaccttcagcaacccgaactacgccaaggtgaagggcagcgacgaggacgccaagatgatcgtggaggctaagccgggccacgcgttgatcggcttcgagatcagcaacgacagcatcaccgtgctgaaggtgtacgaggccaagctgaagcagaactaccaggtggacaaggacagcttgagcgaggtgatctacggcgacatggacaagctgctgtgtccggaccagagcgagcaaatctactacaccaacaacatcgtgttcccgaacgagtacgtgatcaccaagatcgacttcaccaagaagatgaagaccctgcgctacgaggtgaccgccaacttctacgacagcagcaccggcgagatcgacctgaacaagaagaaggtggagagcagcgaggccgagtaccgcaccctgagcgcgaacgacgacggcgtctacatgccactgggcgtgatcagcgagaccttcctgaccccgatcaacggctttggcctgcaggccgacgagaacagccgcctgatcaccctgacctgtaagagctacctgcgcgagctgctgctagccaccgacctgagcaacaaggagaccaagctgatcgtgccaccgagcggcttcatcagcaacatcgtggagaacggcagcatcgaggaggacaacctggagccgtggaaggccaacaacaagaacgcctacgtcgaccacaccggcggcgtgaacggcaccaaggccctgtacgtgcacaaggacggcggcatcagccagttcatcggcgacaagctgaagccgaagaccgagtacgtgatccagtacaccgtgaagggcaagccatcgattcacctgaaggacgagaacaccggctacatccactacgaggacaccaacaacaacctggaggactaccagaccatcaacaagcgcttcaccaccggcaccgacctgaagggcgtgtacctgatcctgaagagccagaacggcgacgaggcctggggcgacaacttcatcatcctggagatcagcccgagcgagaagctgctgagcccggagctgatcaacaccaacaactggaccagcaccggcagcaccaacatcagcggcaacaccctgaccctgtaccagggcggccgcggcatcctgaagcagaacctgcagctggacagcttcagcacctaccgcgtgtacttcagcgtgagcggcgacgccaacgtgcgcatccgcaactcccgcgaggtgctgttcgagaagaggtacatgagcggcgccaaggacgtgagcgagatgttcaccaccaagttcgagaaggacaacttctacatcgagctgagccagggcaacaacctgtacggcggcccgatcgtgcacttctacgacgtgagcatcaagtag

SEQ ID NO: 122 - DNA, 51 bp, Artificial Sequence
  tgene input sequence
tcctattcaatgataagaagagcaccgttcactccaactgcaaacatgtgg

SEQ ID NO: 123 - DNA, 51 bp, Artificial Sequence
  tgene output sequence
tcctattcaaggataagaagagcaccgttcactccaactgcaaacaggtgg

SEQ ID NO: 124 - DNA, 51 bp, Artificial Sequence
  motif input sequence
  misc_feature: n = a, c, g or t
  misc_feature (1)..(17): n is a, c, g, or t
  misc_feature (39)..(51): n is a, c, g, or t
nnnnnnnnnnnnnnnnncagagctcccttcactccaaannnnnnnnnnnnn

SEQ ID NO: 125 - DNA, 51 bp, Artificial Sequence
  A motif output sequence.
cgctcacgacagcctggcagagctcccttcactccaaacattgcgcatctc
